(19) United States
(12) Patent Application Publication
(10) Pub. No.: US 2012/0266327 A1
(43) Pub. Date: Oct. 18, 2012

(54) Plants Having Enhanced Yield-Related Traits and a Method for Making the Same

(75) Inventors: Ana Isabel Sanz Molinero, Madrid (ES); Steven Vandenabeele, Oudenaarde (BE); Christophe Reuzeau, La Chapelle Gonaguet (FR); Yang Do Choi, Seoul (KR); Ju Kon Kim, Bundang-gu (KR)

(73) Assignees: Crop Functional Genomics Center, Seoul (KR); BASF Plant Science Company GmbH, Ludwigshafen (DE)

(21) Appl. No.: 13/502,643

(22) PCT Filed: Oct. 14, 2010
(86) PCT No.: PCT/EP2010/065462

§ 371 Date: Jun. 22, 2012

Related U.S. Application Data
(60) Provisional application No. 61/253,856, filed on Oct. 22, 2009.
(60) Provisional application No. 61/253,855, filed on Oct. 22, 2009.
(60) Provisional application No. 61/254,238, filed on Oct. 23, 2009.
(60) Provisional application No. 61/254,222, filed on Oct. 23, 2009.

(30) Foreign Application Priority Data
Oct. 22, 2009 (EP) 09173796.5
Oct. 22, 2009 (EP) 09173802.1
Oct. 23, 2009 (EP) 09173919.3
Oct. 23, 2009 (EP) 09173961.5

(51) Int. Cl. C12N 15/82; C12N 5/10; A01H 5/10; A01H 5/00

(52) U.S. Cl. 800/290; 435/320.1; 800/298; 800/320; 435/419; 800/320.1; 800/320.2; 800/320.3; 800/278

(57) ABSTRACT

The present invention relates generally to the field of molecular biology and concerns a method for enhancing various economically important yield-related traits in plants. More specifically, the present invention concerns a method for enhancing yield-related traits in plants by modulating expression in a plant of a nucleic acid encoding a CLC-like (Chloride Channel-like) polypeptide, or an OsBURP-like (BURP-domain containing protein) polypeptide, or an AP2/ERF polypeptide or a protein fusion comprising a TPS (trehalose-6-phosphate synthase) and a TPP (trehalose-6-phosphate phosphatase) polypeptide or modulating one or more nucleic acid encoding a TPS and a TPP enzyme, whether comprised in the same or in separate molecules. The present invention also concerns plants having modulated expression of a nucleic acids and constructs comprising them, useful in performing the methods of the invention.

[0001] The present invention relates generally to the field of molecular biology and concerns a method for enhancing yield-related traits in plants by modulating expression in a plant of a nucleic acid encoding a CLC-like (Chloride Channel-like) polypeptide. The present invention also concerns plants having modulated expression of a nucleic acid encoding a CLC-like polypeptide, which plants have enhanced yield-related traits relative to corresponding wild type plants or other control plants. The invention also provides constructs useful in the methods of the invention.

[0002] The present invention relates generally to the field of molecular biology and concerns a method for enhancing yield-related traits in plants by modulating expression in a plant of a nucleic acid encoding an OsBURP-like (BURP-domain containing protein) polypeptide. The present invention also concerns plants having modulated expression of a nucleic acid encoding an OsBURP-like polypeptide, which plants have enhanced yield-related traits relative to corresponding wild type plants or other control plants. The invention also provides constructs useful in the methods of the invention.

[0003] The present invention relates generally to the field of molecular biology and concerns a method for enhancing yield-related traits in plants by modulating expression in a plant of a nucleic acid encoding an AP2/ERF polypeptide. The present invention also concerns plants having modulated expression of a nucleic acid encoding an AP2/ERF polypeptide, which plants have enhanced yield-related traits relative to corresponding wild type plants or other control plants. The invention also provides constructs useful in the methods of the invention.

[0004] The present invention relates generally to the field of molecular biology and concerns a method for enhancing various economically important yield-related traits in plants. More specifically, the present invention concerns a method for enhancing yield-related traits in plants by modulating expression in a plant of a nucleic acid encoding a protein fusion comprising a TPS (trehalose-6-phosphate synthase) and a TPP (trehalose-6-phosphate phosphatise) polypeptide or modulating one or more nucleic acid encoding a TPS and a TPP enzyme, whether comprised in the same or in separate molecules. The present invention also concerns plants having modulated expression of a nucleic acid encoding a TPP polypeptide, which plants have enhanced yield-related traits relative to control plants particularly when cultivated under nitrogen-limiting conditions. The invention also provides hitherto unknown TPS-encoding and TPP-encoding nucleic acids, and constructs comprising the same, useful in performing the methods of the invention.

[0005] The ever-increasing world population and the dwindling supply of arable land available for agriculture fuels research towards increasing the efficiency of agriculture. Conventional means for crop and horticultural improvements utilise selective breeding techniques to identify plants having desirable characteristics. However, such selective breeding techniques have several drawbacks, namely that these techniques are typically labour intensive and result in plants that often contain heterogeneous genetic components that may not always result in the desirable trait being passed on from parent plants. Advances in molecular biology have allowed mankind to modify the germplasm of animals and plants. Genetic engineering of plants entails the isolation and manipulation of genetic material (typically in the form of DNA or RNA) and the subsequent introduction of that genetic material into a plant. Such technology has the capacity to deliver crops or plants having various improved economic, agronomic or horticultural traits.

[0006] A trait of particular economic interest is increased yield. Yield is normally defined as the measurable produce of economic value from a crop. This may be defined in terms of quantity and/or quality. Yield is directly dependent on several factors, for example, the number and size of the organs, plant architecture (for example, the number of branches), seed production, leaf senescence and more. Root development, nutrient uptake, stress tolerance and early may also be important factors in determining yield. Optimizing the abovementioned factors may therefore contribute to increasing crop yield.

[0007] Seed yield is a particularly important trait, since the seeds of many plants are important for human and animal nutrition. Crops such as corn, rice, wheat, canola and soybean account for over half the total human caloric intake, whether through direct consumption of the seeds themselves or through consumption of meat products raised on processed seeds. They are also a source of sugars, oils and many kinds of metabolites used in industrial processes. Seeds contain an embryo (the source of new shoots and roots) and an endosperm (the source of nutrients for embryo growth during germination and during early growth of seedlings). The development of a seed involves many genes, and requires the transfer of metabolites from the roots, leaves and stems into the growing seed. The endosperm, in particular, assimilates the metabolic precursors of carbohydrates, oils and proteins and synthesizes them into storage macromolecules to fill out the grain.

[0008] Another important trait for many crops is early vigour. Improving early vigour is an important objective of modern rice breeding programs in both temperate and tropical rice cultivars. Long roots are important for proper soil anchorage in water-seeded rice. Where rice is sown directly into flooded fields, and where plants must emerge rapidly through water, longer shoots are associated with vigour. Where drill-seeding is practiced, longer mesocotyls and coleoptiles are important for good seedling emergence. The ability to engineer early vigour into plants would be of great importance in agriculture. For example, poor early vigour has been a limitation to the introduction of maize (Zea mays L.) hybrids based on Corn Belt germplasm in the European Atlantic.

[0009] A further important trait is that of improved abiotic stress tolerance. Abiotic stress is a primary cause of crop loss worldwide, reducing average yields for most major crop plants by more than 50% (Wang et al., Planta 218, 1-14, 2003). Abiotic stresses may be caused by drought, salinity, extremes of temperature, chemical toxicity and oxidative stress. The ability to improve plant tolerance to abiotic stress would be of great economic advantage to farmers worldwide and would allow for the cultivation of crops during adverse conditions and in territories where cultivation of crops may not otherwise be possible.

[0010] A trait of emerging importance is improved Nitrogen use efficiency. Nitrogen (N) is one of the major nutritional elements required for plant growth, which is usually the rate-limiting element in plant growth. Nitrogen is part of numerous important compounds found in living cells, like amino acids, proteins (e.g. enzymes), nucleic acids, and chlorophyll. 1.5% to 2% of plant dry matter is nitrogen and approximately 16% of total plant protein. Thus, the availability of nitrogen has a major impact on amino acid synthesis as well as amino acid composition, accumulation of amino acids, on protein synthesis and accumulation thereof, and based thereupon it is a major limiting factor for plant growth and yield (Frink C. R., Proc. Natl. Acad. Sci. USA 96, 1175 (1999)).

[0011] Because of the high nitrogen requirements for crop plants, nitrogen fertilization is a major worldwide agricultural investment, with 80 million metric tons of nitrogen fertilizers (as nitrate and/or ammonium) applied annually (Frink C. R., Proc. Natl. Acad. Sci. USA 96, 1175 (1999)). There are also negative environmental consequences for the extensive use of nitrogen containing fertilizers in crop production since the crops retain only about two-thirds of the applied nitrogen. Therefore high inputs of fertilizer are followed by large outputs by leaching, gaseous losses and crop removal. The unabsorbed nitrogen can subsequently leach into the soil and contaminate water supplies (Frink C. R., Proc. Natl. Acad. Sci. USA 96, 1175 (1999)). Because of the high leaching losses of nitrogen from agricultural ecosystems to surface water and groundwater, nitrogen is also recognized as an pollutant. Nitrogen leaching, namely as nitrate from agricultural lands, affects drinking waterquality and causes eutrophication of lakes and coastal areas. Abundant use of nitrogen containing fertilizers can further lead to final deterioration of soil quality, to environmental pollution and health hazards.

[0012] Because of the high costs of nitrogen fertilizer in relation to the revenues for agricultural products, and additionally its deleterious effect on the environment, it is desirable to develop strategies to reduce nitrogen input and/or to optimize nitrogen uptake and/or utilization of a given nitrogen availability while simultaneously maintaining optimal yield, productivity and quality of photosynthetic active organisms, preferably cultivated plants, e.g. crops. Also it is desirable to obtain “existing” yield of crops with lower fertilizer input and/or higher yield on soils of similar or even poorer quality. Therefore, there is still a need for photosynthetic active organisms, especially daily plants, with increased yield, in particular an increased yield-related trait, e.g. an increased nutrient use efficiency, such as plants that are capable to use nitrogen more efficiently so that less nitrogen is required for the same yield or higher yields may be obtained with current levels of nitrogen use. In addition, there is still a need for photosynthetic active organism, especially plants, to increase number of flowers, fruits and biomass production. It is an object of this invention to provide methods for increasing yield of a plant, in particular yield-related traits such as increased number of flowers or seeds or increase biomass, especially under conditions of limited nitrogen supply.

[0013] Crop yield may therefore be increased by optimising one of the above-mentioned factors.

[0014] Depending on the end use, the modification of certain yield traits may be favoured over others. For example for applications such as forage or wood production, or bio-fuel resource, an increase in the vegetative parts of a plant may be desirable, and for applications such as flour, starch or oil production, an increase in seed parameters may be particularly desirable. Even amongst the seed parameters, some may be favoured over others, depending on the application. Various mechanisms may contribute to increasing seed yield, whether that is in the form of increased seed size or increased seed number.

[0015] One approach to increasing yield (seed yield and/or biomass) in plants may be through modification of the inherent growth mechanisms of a plant, such as the cell cycle or various signalling pathways involved in plant growth or in defense mechanisms.

[0016] It has now been found that various yield-related traits may be improved in plants by modulating expression in a plant of a nucleic acid encoding a CLC-like (Chloride Channel-like) polypeptide in a plant.

[0017] It has now been found that various yield-related traits may be improved in plants by modulating expression in a plant of a nucleic acid encoding an OsBURP-like (BURP-domain containing protein) polypeptide in a plant.

[0018] It has now been found that various yield-related traits may be improved in plants by modulating expression in a plant of a nucleic acid encoding an AP2/ERF polypeptide in a plant.

[0019] It has now been found that various yield-related traits may be improved in plants by modulating expression in a plant of a nucleic acid encoding a protein fusion comprising a TPS (trehalose-6-phosphate synthase and a TPP trehalose-6-phosphate phosphatase polypeptide or modulating one or more nucleic acid encoding a TPS and a TPP enzyme, whether comprised in the same or in separate nucleic acid molecules.

### BACKGROUND

### 1. CLC-Like Polypeptide

[0020] Anion channels/transporters play an important role in controlling metabolic processes and directing signalling. These processes include nutrient loading from the root into the xylem, compartmentalisation of metabolites within cells and coupling with proton gradients, regulating gas exchange by stomatal movements. Nitrate and malate represent the majority of anions in a plant cell. Nitrate is a nutrient but can act as a signalling molecule as well. Plants have a sophisticated nitrate uptake system involving both low- and high-affinity transporters, nitrate is next either transported through the xylem to enter into the cellular metabolism or is stored locally. Cells assimilate nitrate via the nitrate reductase pathway or store it in the tonoplast, and a dynamic balance exists between cytosolic and vacuolar nitrate levels, regulated by uptake of extracellular nitrate, storage in the vacuole and anabolism. The discovery of the chloride channel (CLC) family allowed unravelling the mechanism of proton/nitrate exchange between tonoplasts and cytosol. Determination of subcellular localization, expression patterns, and characterization of knockout mutant phenotypes, gave insight in the physiological role of CLC proteins. Phenotypic analyses showed that clca-1 and clca-2 mutant plants have a reduced nitrate compared to that of wild-type in root and shoot tissues. Also clcc and clce mutants showed lower nitrate levels compared to control plants. An overview of the art is provided by De Angeli et al., Phil. Trans. R. Soc. B 364, 195-201, 2009; and the references cited therein. However, still little is know about the precise role of CLC proteins, and the effect of overexpressing CLC genes on plant phenotypes.

### 2. OsBURP-Like Polypeptide

[0021] BURP-domain containing proteins have been first described by Hattori et al. (Mol. Gen. Genet. 1998, Vol. 259, pages 424-428). According to their analyses, the BURP-domain proteins consist of (i) an N-terminal hydrophobic domain, (ii) a short (conserved) segment, (iiii) an optional segment of repeat units, and (iv) the C-terminal BURP domain. Initially, said protein family was divided into four subfamilies named after its most prominent member: BNM2-like, USP-like, RD22-like, and PG1-like subfamily. In a recent study, Ding et al. (Planta 2009, Vol. 230, pages 149-163) identified a total of seven subfamilies, i.e. subfamilies BURP V, VI, and VII in addition to the subfamilies described by Hattori et al. These newly identified subfamilies have in common that they lack the optional segment of repeat units. It was shown by Ding and his colleagues that the majority of members of BURP-domain containing proteins were induced by various stress factors such as drought, salt, cold, and abscisic acid. Furthermore, Yamaguchi-Shinozaki and co-workers reported in several studies that the AtMYC2- and AtMYB2-regulated induction of one member of the BURP-domain containing families, namely RD22, is mediated by abscisic acid (Mol. Gen. Genet., 1993, Vol. 238, pages 17-25; Plant Cell, 1997, Vol. 9, pages 1859-1868; Plant Cell, 2003, Vol. 15, pages 63-78). However, the exact role of the function of BURP-domain containing proteins in plants, particularly in rice, still remains to be elucidated.

### 3. AP2/ERF Polypeptide

[0022] The ERF family is a large gene family of transcription factors and is part of the AP2/ERF superfamily, which also contains the AP2 and RAV families (Riechmann et al., 2000, Science 290: 2105-2110). The AP2/ERF superfamily is defined by the AP2/ERF domain, which consists of about 60 to 70 amino acids and is involved in DNA binding. These three families have been defined as follows. The AP2 family proteins contain two repeated AP2/ERF domains, the ERF family proteins contain a single AP2/ERF domain, and the RAV family proteins contain a B3 domain, which is a DNA-binding domain conserved in other plant-specific transcription factors, including VP1/ABI3, in addition to the single AP2/ERF domain. The ERF family is sometimes further divided into two major subfamilies, the ERF subfamily and the CBF/DREB subfamily (Sakuma et al., 2002, Biochem Biophys Res Commun 290: 998-1009). It has been demonstrated that the AP2/ERF proteins have important functions in the transcriptional regulation of a variety of biological processes related to growth and development, as well as various responses to environmental stimuli. Genes in the AP2 family have been shown to participate in the regulation of developmental processes, e.g. flower development (Elliott et al., 1996, Plant Cell 8: 155-168), spikelet meristem determinacy (Chuck et al., 1998 Genes Dev 12: 1145-1154), leaf epidermal cell identity (Moose and Sisco, 1996 Genes Dev 10: 3018-3027), and embryo development (Boutilier et al., 2002 Plant Cell 14: 1737-1749). Recently, the involvement of members of the RAV family in ethylene response (Alonso et al., 2003 Science 301: 653-657) and in brassinosteroid response (Hu et al., 2004 Cell Res 14: 8-15) was reported. After finding the tobacco ERFs (Ohme-Takagi and Shinshi, 1995 Plant Cell 7: 173-182), many proteins in the ERF family were identified and implicated in many diverse functions in cellular processes, such as hormonal signal transduction (Ohme-Takagi and Shinshi, 1995), response to biotic (Yamamoto et al., 1999 Plant J 20: 571-579; Gu et al., 2000 Plant Cell 12: 771-786) and abiotic stresses (Stockinger et al., 1997 Proc Natl Acad Sci USA 94: 1035-1040; Liu et al., 1998 Plant Cell 10: 1391-1406; Dubouzet et al., 2003 Plant J 33: 751-763), and regulation of metabolism (van der Fits and Memelink, 2000 Science 289: 295-297; Aharoni et al., 2004 Plant Cell 16: 2463-2480; Broun et al., 2004 Proc Natl Acad Sci USA 101: 4706-4711; Zhang et al., 2005 Plant J 42: 689-707), and in developmental processes (van der Graaff et al., 2000 Development 127: 4971-4980; Banno et al., 2001 Plant Cell 13: 2609-2618; Chuck et al., 2002 Science 298: 1238-1241) in various plant species. After the sequencing of the Arabidopsis genome was completed (Arabidopsis Genome Initiative, 2000), 145 genes were postulated to encode proteins containing the AP2/ERF domain, with 83% (121 genes) of these genes belonging to the ERF family (Sakuma et al., 2002 Biochem Biophys Res Commun 290: 998-1009). To date, most of the members of the ERF family have yet to be studied, despite the likelihood that these genes play important roles in many physiological aspects in plants. A great deal of experimental work will be required to determine the specific biological function of each of these genes. On the basis of phylogenetic analyses, it has become apparent that a large gene family of transcription factors consists of subgroups of genes that are closely related to each other (Kranz et al., 1998 Plant J 16: 263-276; Parenicova et al., 2003 Plant Cell 15: 1538-1551; Toledo-Ortiz et al., 2003 Plant Cell 15: 1749-1770; Reyes et al., 2004 Plant Physiol 134: 1718-1732; Tian et al., 2004 Plant Mol Biol 54: 519-532). At least two subfamilies were studied by Nakano et al. (Plant Physiology, February 2006, 140, pp. 411-432) CBF/DREB subfamily (Group A) and ERF subfamily (Group B) being those subfamilies further subdivided in classes.

### 4. A Fusion Between a TPS and a TPP Polypeptide

[0023] Trehalose phosphate synthase (TPS) is known to catalyse the transfer of glucose from uridine diphosphate glucose (UDP) to glucose-6-phosphate, producing trehalose-6-phosphate (T6P) and UDP, whereas trehalose-6-phosphatase (TPP) hydrolyses T6P to release trehalose. Trehalose, a dimer of glucose, is a sugar of emerging significance and has been described as ‘a metabolic regulator that has an impact like that of a hormone’ It is believed that the phoshorylated form of trehalose, T6P, is the active component that regulates its effect (Paul, 2007, Current Opinion in Plant Biology, 10:303-309).

[0024] Genes encoding TPS and TPP activity have been found in many organisms from E. coli to plants. The distribution and structure of the TPS and TPP gene family in Arabidopsis thaliana has been reported (Leyman et al. 2001 TRENDS in Plant Science Vol. 6 No. 11 1360-1385). The genes were classified in TPS Class I, TPS Class II and TPP class III, with Class I having TPS activity and Class II and Class III having TPP activity. Representatives of each of these classes are present in other plants.

[0025] The manipulation of the trehalose synthesis genes in plants, either TPS or TPP genes has been often associated with pleiotropic effects such as disruption of root, seed development and inflorescence architecture (Romero et al. Planta 1997, 201:293-297; Eastmond et al. Plant J 2002, 29:223-235; Satoh-Nagasawa et al. Nature 2006, 441:227-230). Such effects complicate the use of TPS and TPP genes to increase the yield of crop plants since they typically lowered the yield of the plant. Presumably such pleiotropic effects may be due to variations of the intracellular levels of T6P (trehalose-6-phosphate) (WO9726357).

[0026] Fusion of TPS and TPP enzymatic activity in a single polypeptide has been previously reported either from natural or from synthetic origin (Seo et. al. Applied and environmental microbiology, 66, p. 2484-2490; Chung, Saline Systems 2008, 4:18). Plants transformed with a fusion of a TPS and a TPP enzyme were shown to have increased abiotic stress tolerance (Garg et al. PNAS 2002_vol. 99_{—}15898-15903).

[0027] Generally, effects of trehalose genes on plant development are attributed to alteration in intracellular levels of T6P while increase in stress tolerance is attributed to alteration in trehalose levels.

[0028] In an attempt to increase stress tolerance by increasing the levels of trehalose in a plant without significantly altering the intracellular availability of T6P, a protein fusion between a TPS and a TPP active portion was overexpressed in rice plants. As expected no T6P-associated pleitropic effects negatively affecting yield of the plants were observed. However and contrary to expectations the development of the plants was altered such that the plants produced more inflorescences (panicles) and more seeds. These effects were observed in the absence of abiotic stress, furthermore it was more prominent under Nitrogen deficiency.

[0029] Most surprising was the effect of increasing the number of florets in a plant. This finding suggest a role for trehalose beyond that of T6P in flower development in plant.

[0030] Production of florets in plants requires the transformation of vegetative meristems in floral meristems, the establishment of such floral meristems and the successful patterning of the meristem. Many genes have been involved in the control of these processes, for example genes controlling auxin and ABA levels (PINI, NCED3; farnesyl transferase, AP1), and sugar metabolism (B-amylases, genes of the shikimate pathway) are involved in transition from vegetative to floral meristem. Establishment of the meristems involve genes such as STM, Wuschel, Clavata and knotted-like. Appropriate patterning of the floral meristem further involves hormonal action such as brasinosteroids mediated by genes such as BZR1 and also floral homeotic transcription factors (MADS-Box, Fruitful, AP1, Sepallata).

### SUMMARY

[0031] Surprisingly, it has now been found that modulating expression of a nucleic acid encoding a CLC-like polypeptide, or an OsBURP-like polypeptide, or an AP2/ERF polypeptide, gives plants having enhanced yield-related traits, in particular increased yield relative to control plants.

[0032] According to one embodiment, there is provided a method for improving yield-related traits in plants relative to control plants, comprising modulating expression in a plant of a nucleic acid encoding a CLC-like polypeptide, or an OsBURP-like polypeptide, or an AP2/ERF polypeptide.

[0033] Concerning a fusion between a TPS and TPP polypeptide, it now has surprisingly been found that modulating expression of a nucleic acid encoding a fusion between a TPS and TPP polypeptide gives plants having enhanced yield-related traits, in particular increased number of florets relative to control plants, especially under N deficiency growth conditions.

[0034] According to one embodiment, there is provided a method for improving yield-related traits in plants relative to control plants, comprising modulating expression in a plant of a nucleic acid encoding a fusion between a TPS and TPP polypeptide.

### DEFINITIONS

[0035] The following definitions will be used throughout the present specification.

### Polypeptide(s)/Protein(s)

[0036] The terms “polypeptide” and “protein” are used interchangeably herein and refer to amino acids in a polymeric form of any length, linked together by peptide bonds.

### Polynucleotide(s)/Nucleic Acid(s)/Nucleic Acid Sequence(s)/Nucleotide Sequence(s)

[0037] The terms “polynucleotide(s)”, “nucleic acid sequence(s)”, “nucleotide sequence(s)”, “nucleic acid(s)”, “nucleic acid molecule” are used interchangeably herein and refer to nucleotides, either ribonucleotides or deoxyribonucleotides or a combination of both, in a polymeric unbranched form of any length.

### Homologue(s)

[0038] “Homologues” of a protein encompass peptides, oligopeptides, polypeptides, proteins and enzymes having amino acid substitutions, deletions and/or insertions relative to the unmodified protein in question and having similar biological and functional activity as the unmodified protein from which they are derived.

[0039] A deletion refers to removal of one or more amino acids from a protein.

[0040] An insertion refers to one or more amino acid residues being introduced into a predetermined site in a protein. Insertions may comprise N-terminal and/or C-terminal fusions as well as intra-sequence insertions of single or multiple amino acids. Generally, insertions within the amino acid sequence will be smaller than N- or C-terminal fusions, of the order of about 1 to 10 residues. Examples of N- or C-terminal fusion proteins or peptides include the binding domain or activation domain of a transcriptional activator as used in the yeast two-hybrid system, phage coat proteins, (histidine)-6-tag, glutathione S-transferase-tag, protein A, maltose-binding protein, dihydrofolate reductase, Tag•100 epitope, c-myc epitope, FLAG®-epitope, lacZ, CMP (calmodulin-binding peptide), HA epitope, protein C epitope and VSV epitope.

[0041] A substitution refers to replacement of amino acids of the protein with other amino acids having similar properties (such as similar hydrophobicity, hydrophilicity, antigenicity, propensity to form or break α-helical structures or β-sheet structures). Amino acid substitutions are typically of single residues, but may be clustered depending upon functional constraints placed upon the polypeptide and may range from 1 to 10 amino acids; insertions will usually be of the order of about 1 to 10 amino acid residues. The amino acid substitutions are preferably conservative amino acid substitutions. Conservative substitution tables are well known in the art (see for example Creighton (1984) Proteins. W.H. Freeman and Company (Eds) and Table 1 below).

TABLE 1
Examples of conserved amino acid substitutions

| Residue | Conservative Substitutions |
|---|---|
| Ala | Ser |
| Arg | Lys |
| Asn | Gln; His |
| Asp | Glu |
| Gln | Asn |
| Cys | Ser |
| Glu | Asp |
| Gly | Pro |
| His | Asn; Gln |
| Ile | Leu, Val |
| Leu | Ile; Val |
| Lys | Arg; Gln |
| Met | Leu; Ile |
| Phe | Met; Leu; Tyr |
| Ser | Thr; Gly |
| Thr | Ser; Val |
| Trp | Tyr |
| Tyr | Trp; Phe |
| Val | Ile; Leu |

[0042] Amino acid substitutions, deletions and/or insertions may readily be made using peptide synthetic techniques well known in the art, such as solid phase peptide synthesis and the like, or by recombinant DNA manipulation. Methods for the manipulation of DNA sequences to produce substitution, insertion or deletion variants of a protein are well known in the art. For example, techniques for making substitution mutations at predetermined sites in DNA are well known to those skilled in the art and include M13 mutagenesis, T7-Gen in vitro mutagenesis (USB, Cleveland, Ohio), QuickChange Site Directed mutagenesis (Stratagene, San Diego, Calif.), PCR-mediated site-directed mutagenesis or other site-directed mutagenesis protocols.

### Derivatives

[0043] “Derivatives” include peptides, oligopeptides, polypeptides which may, compared to the amino acid sequence of the naturally-occurring form of the protein, such as the protein of interest, comprise substitutions of amino acids with non-naturally occurring amino acid residues, or additions of non-naturally occurring amino acid residues. “Derivatives” of a protein also encompass peptides, oligopeptides, polypeptides which comprise naturally occurring altered (glycosylated, acylated, prenylated, phosphorylated, myristoylated, sulphated etc.) or non-naturally altered amino acid residues compared to the amino acid sequence of a naturally-occurring form of the polypeptide. A derivative may also comprise one or more non-amino acid substituents or additions compared to the amino acid sequence from which it is derived, for example a reporter molecule or other ligand, covalently or non-covalently bound to the amino acid sequence, such as a reporter molecule which is bound to facilitate its detection, and non-naturally occurring amino acid residues relative to the amino acid sequence of a naturally-occurring protein. Furthermore, “derivatives” also include fusions of the naturally-occurring form of the protein with tagging peptides such as FLAG, HIS6 or thioredoxin (for a review of tagging peptides, see Terpe, Appl. Microbiol. Biotechnol. 60, 523-533, 2003).

### Orthologue(s)/Paralogue(s)

[0044] Orthologues and paralogues encompass evolutionary concepts used to describe the ancestral relationships of genes. Paralogues are genes within the same species that have originated through duplication of an ancestral gene; orthologues are genes from different organisms that have originated through speciation, and are also derived from a common ancestral gene.

### Domain, Motif/Consensus Sequence/Signature

[0045] The term “domain” refers to a set of amino acids conserved at specific positions along an alignment of sequences of evolutionarily related proteins. While amino acids at other positions can vary between homologues, amino acids that are highly conserved at specific positions indicate amino acids that are likely essential in the structure, stability or function of a protein. Identified by their high degree of conservation in aligned sequences of a family of protein homologues, they can be used as identifiers to determine if any polypeptide in question belongs to a previously identified polypeptide family.

[0046] The term “motif” or “consensus sequence” or “signature” refers to a short conserved region in the sequence of evolutionarily related proteins. Motifs are frequently highly conserved parts of domains, but may also include only part of the domain, or be located outside of conserved domain (if all of the amino acids of the motif fall outside of a defined domain).

[0047] Specialist databases exist for the identification of domains, for example, SMART (Schultz et al. (1998) Proc. Natl. Acad. Sci. USA 95, 5857-5864; Letunic et al. (2002) Nucleic Acids Res 30, 242-244), InterPro (Mulder et al., (2003) Nucl. Acids. Res. 31, 315-318), Prosite (Bucher and Bairoch (1994), A generalized profile syntax for biomolecular sequences motifs and its function in automatic sequence interpretation. (In) ISMB-94; Proceedings 2nd International Conference on Intelligent Systems for Molecular Biology. Altman R., Brutlag D., Karp P., Lathrop R., Searls D., Eds., pp 53-61, AAAI Press, Menlo Park; Hulo et al., Nucl. Acids. Res. 32:D134-D137, (2004)), or Pfam (Bateman et al., Nucleic Acids Research 30(1): 276-280 (2002)). A set of tools for in silico analysis of protein sequences is available on the ExPASy proteomics server (Swiss Institute of Bioinformatics (Gasteiger et al., ExPASy: the proteomics server for in-depth protein knowledge and analysis, Nucleic Acids Res. 31:3784-3788 (2003)). Domains or motifs may also be identified using routine techniques, such as by sequence alignment.

[0048] Methods for the alignment of sequences for comparison are well known in the art, such methods include GAP, BESTFIT, BLAST, FASTA and TFASTA. GAP uses the algorithm of Needleman and Wunsch ((1970) J Mol Biol 48: 443-453) to find the global (i.e. spanning the complete sequences) alignment of two sequences that maximizes the number of matches and minimizes the number of gaps. The BLAST algorithm (Altschul et al. (1990) J Mol Biol 215: 403-10) calculates percent sequence identity and performs a statistical analysis of the similarity between the two sequences. The software for performing BLAST analysis is publicly available through the National Centre for Biotechnology Information (NCBI). Homologues may readily be identified using, for example, the ClustalW multiple sequence alignment algorithm (version 1.83), with the default pairwise alignment parameters, and a scoring method in percentage. Global percentages of similarity and identity may also be determined using one of the methods available in the MatGAT software package (Campanella et al., BMC Bioinformatics. 2003 Jul. 10; 4:29. MatGAT: an application that generates similarity/identity matrices using protein or DNA sequences.). Minor manual editing may be performed to optimise alignment between conserved motifs, as would be apparent to a person skilled in the art. Furthermore, instead of using full-length sequences for the identification of homologues, specific domains may also be used. The sequence identity values may be determined over the entire nucleic acid or amino acid sequence or over selected domains or conserved motif(s), using the programs mentioned above using the default parameters. For local alignments, the Smith-Waterman algorithm is particularly useful (Smith T F, Waterman M S (1981) J. Mol. Biol. 147(1); 195-7).

### Reciprocal BLAST

[0049] Typically, this involves a first BLAST involving BLASTing a query sequence (for example using any of the sequences listed in Table A of the Examples section) against any sequence database, such as the publicly available NCBI database. BLASTN or TBLASTX (using standard default values) are generally used when starting from a nucleotide sequence, and BLASTP or TBLASTN (using standard default values) when starting from a protein sequence. The BLAST results may optionally be filtered. The full-length sequences of either the filtered results or non-filtered results are then BLASTed back (second BLAST) against sequences from the organism from which the query sequence is derived. The results of the first and second BLASTs are then compared. A paralogue is identified if a high-ranking hit from the first blast is from the same species as from which the query sequence is derived, a BLAST back then ideally results in the query sequence amongst the highest hits; an orthologue is identified if a high-ranking hit in the first BLAST is not from the same species as from which the query sequence is derived, and preferably results upon BLAST back in the query sequence being among the highest hits.

[0050] High-ranking hits are those having a low E-value. The lower the E-value, the more significant the score (or in other words the lower the chance that the hit was found by chance). Computation of the E-value is well known in the art. In addition to E-values, comparisons are also scored by percentage identity. Percentage identity refers to the number of identical nucleotides (or amino acids) between the two compared nucleic acid (or polypeptide) sequences over a particular length. In the case of large families, ClustalW may be used, followed by a neighbour joining tree, to help visualize clustering of related genes and to identify orthologues and paralogues.

### Hybridisation

[0051] The term “hybridisation” as defined herein is a process wherein substantially homologous complementary nucleotide sequences anneal to each other. The hybridisation process can occur entirely in solution, i.e. both complementary nucleic acids are in solution. The hybridisation process can also occur with one of the complementary nucleic acids immobilised to a matrix such as magnetic beads, Sepharose beads or any other resin. The hybridisation process can furthermore occur with one of the complementary nucleic acids immobilised to a solid support such as a nitro-cellulose or nylon membrane or immobilised by e.g. photolithography to, for example, a siliceous glass support (the latter known as nucleic acid arrays or microarrays or as nucleic acid chips). In order to allow hybridisation to occur, the nucleic acid molecules are generally thermally or chemically denatured to melt a double strand into two single strands and/or to remove hairpins or other secondary structures from single stranded nucleic acids.

[0052] The term “stringency” refers to the conditions under which a hybridisation takes place. The stringency of hybridisation is influenced by conditions such as temperature, salt concentration, ionic strength and hybridisation buffer composition. Generally, low stringency conditions are selected to be about 30° C. lower than the thermal melting point (Tₘ) for the specific sequence at a defined ionic strength and pH. Medium stringency conditions are when the temperature is 20° C. below Tₘ, and high stringency conditions are when the temperature is 10° C. below Tₘ. High stringency hybridisation conditions are typically used for isolating hybridising sequences that have high sequence similarity to the target nucleic acid sequence. However, nucleic acids may deviate in sequence and still encode a substantially identical polypeptide, due to the degeneracy of the genetic code. Therefore medium stringency hybridisation conditions may sometimes be needed to identify such nucleic acid molecules.

[0053] The Tₘ is the temperature under defined ionic strength and pH, at which 50% of the target sequence hybridises to a perfectly matched probe. The Tₘ is dependent upon the solution conditions and the base composition and length of the probe. For example, longer sequences hybridise specifically at higher temperatures. The maximum rate of hybridisation is obtained from about 16° C. up to 32° C. below Tₘ. The presence of monovalent cations in the hybridisation solution reduce the electrostatic repulsion between the two nucleic acid strands thereby promoting hybrid formation; this effect is visible for sodium concentrations of up to 0.4M (for higher concentrations, this effect may be ignored). Formamide reduces the melting temperature of DNA-DNA and DNA-RNA duplexes with 0.6 to 0.7° C. for each percent formamide, and addition of 50% formamide allows hybridisation to be performed at 30 to 45° C., though the rate of hybridisation will be lowered. Base pair mismatches reduce the hybridisation rate and the thermal stability of the duplexes. On average and for large probes, the Tm decreases about 1° C. per % base mismatch. The Tₘ may be calculated using the following equations, depending on the types of hybrids:

1) DNA-DNA hybrids (Meinkoth and Wahl, Anal. Biochem., 138: 267-284, 1984):

Tₘ=81.5° C.+16.6×log₁₀[Na⁺]^{a}+0.41×%[G/C^{b}]−500×[L^{c}]⁻¹−0.61×% formamide

2) DNA-RNA or RNA-RNA hybrids:

Tₘ=79.8° C.+18.5(log₁₀[Na⁺]ₐ)+0.58(%G/C^{b})+11.8(%G/C^{b})²−820/L^{c}

3) oligo-DNA or oligo-RNAs hybrids:

For <20 nucleotides:Tₘ=2(Iₙ)

For 20-35 nucleotides:Tₘ=22+1.46(Iₙ)

^{a} or for other monovalent cation, but only accurate in the 0.01-0.4 M range.
^{b} only accurate for %GC in the 30% to 75% range.
^{c} L=length of duplex in base pairs.
^{d} oligo, oligonucleotide; Iₙ,=effective length of primer=2×(no. of G/C)+(no. of A/T).

[0054] Non-specific binding may be controlled using any one of a number of known techniques such as, for example, blocking the membrane with protein containing solutions, additions of heterologous RNA, DNA, and SDS to the hybridisation buffer, and treatment with Rnase. For non-homologous probes, a series of hybridizations may be performed by varying one of (i) progressively lowering the annealing temperature (for example from 68° C. to 42° C.) or (ii) progressively lowering the formamide concentration (for example from 50% to 0%). The skilled artisan is aware of various parameters which may be altered during hybridisation and which will either maintain or change the stringency conditions.

[0055] Besides the hybridisation conditions, specificity of hybridisation typically also depends on the function of post-hybridisation washes. To remove background resulting from non-specific hybridisation, samples are washed with dilute salt solutions. Critical factors of such washes include the ionic strength and temperature of the final wash solution: the lower the salt concentration and the higher the wash temperature, the higher the stringency of the wash. Wash conditions are typically performed at or below hybridisation stringency. A positive hybridisation gives a signal that is at least twice of that of the background. Generally, suitable stringent conditions for nucleic acid hybridisation assays or gene amplification detection procedures are as set forth above. More or less stringent conditions may also be selected. The skilled artisan is aware of various parameters which may be altered during washing and which will either maintain or change the stringency conditions.

[0056] For example, typical high stringency hybridisation conditions for DNA hybrids longer than 50 nucleotides encompass hybridisation at 65° C. in 1×SSC or at 42° C. in 1×SSC and 50% formamide, followed by washing at 65° C. in 0.3×SSC. Examples of medium stringency hybridisation conditions for DNA hybrids longer than 50 nucleotides encompass hybridisation at 50° C. in 4×SSC or at 40° C. in 6×SSC and 50% formamide, followed by washing at 50° C. in 2×SSC. The length of the hybrid is the anticipated length for the hybridising nucleic acid. When nucleic acids of known sequence are hybridised, the hybrid length may be determined by aligning the sequences and identifying the conserved regions described herein. 1×SSC is 0.15M NaCl and 15 mM sodium citrate; the hybridisation solution and wash solutions may additionally include 5×Denhardt's reagent, 0.5-1.0% SDS, 100 μg/ml denatured, fragmented salmon sperm DNA, 0.5% sodium pyrophosphate.

[0057] For the purposes of defining the level of stringency, reference can be made to Sambrook et al. (2001) Molecular Cloning: a laboratory manual, 3rd Edition, Cold Spring Harbor Laboratory Press, CSH, New York or to Current Protocols in Molecular Biology, John Wiley & Sons, N.Y. (1989 and yearly updates).

### Splice Variant

[0058] The term “splice variant” as used herein encompasses variants of a nucleic acid sequence in which selected introns and/or exons have been excised, replaced, displaced or added, or in which introns have been shortened or lengthened. Such variants will be ones in which the biological activity of the protein is substantially retained; this may be achieved by selectively retaining functional segments of the protein. Such splice variants may be found in nature or may be manmade. Methods for predicting and isolating such splice variants are well known in the art (see for example Foissac and Schiex (2005) BMC Bioinformatics 6: 25).

### Allelic Variant

[0059] Alleles or allelic variants are alternative forms of a given gene, located at the same chromosomal position. Allelic variants encompass Single Nucleotide Polymorphisms (SNPs), as well as Small Insertion/Deletion Polymorphisms (INDELs). The size of INDELs is usually less than 100 bp. SNPs and INDELs form the largest set of sequence variants in naturally occurring polymorphic strains of most organisms.

### Endogenous Gene

[0060] Reference herein to an “endogenous” gene not only refers to the gene in question as found in a plant in its natural form (i.e., without there being any human intervention), but also refers to that same gene (or a substantially homologous nucleic acid/gene) in an isolated form subsequently (re)introduced into a plant (a transgene). For example, a transgenic plant containing such a transgene may encounter a substantial reduction of the transgene expression and/or substantial reduction of expression of the endogenous gene. The isolated gene may be isolated from an organism or may be manmade, for example by chemical synthesis.

### Gene Shuffling/Directed Evolution

[0061] Gene shuffling or directed evolution consists of iterations of DNA shuffling followed by appropriate screening and/or selection to generate variants of nucleic acids or portions thereof encoding proteins having a modified biological activity (Castle et al., (2004) Science 304(5674): 1151-4; U.S. Pat. Nos. 5,811,238 and 6,395,547).

### Construct

[0062] Additional regulatory elements may include transcriptional as well as translational enhancers. Those skilled in the art will be aware of terminator and enhancer sequences that may be suitable for use in performing the invention. An intron sequence may also be added to the 5′ untranslated region (UTR) or in the coding sequence to increase the amount of the mature message that accumulates in the cytosol, as described in the definitions section. Other control sequences (besides promoter, enhancer, silencer, intron sequences, 3′UTR and/or 5′UTR regions) may be protein and/or RNA stabilizing elements. Such sequences would be known or may readily be obtained by a person skilled in the art.

[0063] The genetic constructs of the invention may further include an origin of replication sequence that is required for maintenance and/or replication in a specific cell type. One example is when a genetic construct is required to be maintained in a bacterial cell as an episomal genetic element (e.g. plasmid or cosmid molecule). Preferred origins of replication include, but are not limited to, the f1-ori and colE1.

[0064] For the detection of the successful transfer of the nucleic acid sequences as used in the methods of the invention and/or selection of transgenic plants comprising these nucleic acids, it is advantageous to use marker genes (or reporter genes). Therefore, the genetic construct may optionally comprise a selectable marker gene. Selectable markers are described in more detail in the “definitions” section herein. The marker genes may be removed or excised from the transgenic cell once they are no longer needed. Techniques for marker removal are known in the art, useful techniques are described above in the definitions section.

### Regulatory Element/Control Sequence/Promoter

[0065] The terms “regulatory element”, “control sequence” and “promoter” are all used interchangeably herein and are to be taken in a broad context to refer to regulatory nucleic acid sequences capable of effecting expression of the sequences to which they are ligated. The term “promoter” typically refers to a nucleic acid control sequence located upstream from the transcriptional start of a gene and which is involved in recognising and binding of RNA polymerase and other proteins, thereby directing transcription of an operably linked nucleic acid. Encompassed by the aforementioned terms are transcriptional regulatory sequences derived from a classical eukaryotic genomic gene (including the TATA box which is required for accurate transcription initiation, with or without a CCAAT box sequence) and additional regulatory elements (i.e. upstream activating sequences, enhancers and silencers) which alter gene expression in response to developmental and/or external stimuli, or in a tissue-specific manner. Also included within the term is a transcriptional regulatory sequence of a classical prokaryotic gene, in which case it may include a −35 box sequence and/or −10 box transcriptional regulatory sequences. The term “regulatory element” also encompasses a synthetic fusion molecule or derivative that confers, activates or enhances expression of a nucleic acid molecule in a cell, tissue or organ.

[0066] A “plant promoter” comprises regulatory elements, which mediate the expression of a coding sequence segment in plant cells. Accordingly, a plant promoter need not be of plant origin, but may originate from viruses or micro-organisms, for example from viruses which attack plant cells. The “plant promoter” can also originate from a plant cell, e.g. from the plant which is transformed with the nucleic acid sequence to be expressed in the inventive process and described herein. This also applies to other “plant” regulatory signals, such as “plant” terminators. The promoters upstream of the nucleotide sequences useful in the methods of the present invention can be modified by one or more nucleotide substitution(s), insertion(s) and/or deletion(s) without interfering with the functionality or activity of either the promoters, the open reading frame (ORF) or the 3′-regulatory region such as terminators or other 3′ regulatory regions which are located away from the ORF. It is furthermore possible that the activity of the promoters is increased by modification of their sequence, or that they are replaced completely by more active promoters, even promoters from heterologous organisms. For expression in plants, the nucleic acid molecule must, as described above, be linked operably to or comprise a suitable promoter which expresses the gene at the right point in time and with the required spatial expression pattern.

[0067] For the identification of functionally equivalent promoters, the promoter strength and/or expression pattern of a candidate promoter may be analysed for example by operably linking the promoter to a reporter gene and assaying the expression level and pattern of the reporter gene in various tissues of the plant. Suitable well-known reporter genes include for example beta-glucuronidase or beta-galactosidase. The promoter activity is assayed by measuring the enzymatic activity of the beta-glucuronidase or beta-galactosidase. The promoter strength and/or expression pattern may then be compared to that of a reference promoter (such as the one used in the methods of the present invention). Alternatively, promoter strength may be assayed by quantifying mRNA levels or by comparing mRNA levels of the nucleic acid used in the methods of the present invention, with mRNA levels of housekeeping genes such as 18S rRNA, using methods known in the art, such as Northern blotting with densitometric analysis of autoradiograms, quantitative real-time PCR or RT-PCR (Heid et al., 1996 Genome Methods 6: 986-994). Generally by “weak promoter” is intended a promoter that drives expression of a coding sequence at a low level. By “low level” is intended at levels of about 1/10,000 transcripts to about 1/100,000 transcripts, to about 1/500,0000 transcripts per cell. Conversely, a “strong promoter” drives expression of a coding sequence at high level, or at about 1/10 transcripts to about 1/100 transcripts to about 1/1000 transcripts per cell. Generally, by “medium strength promoter” is intended a promoter that drives expression of a coding sequence at a lower level than a strong promoter, in particular at a level that is in all instances below that obtained when under the control of a 35S CaMV promoter.

### Operably Linked

[0068] The term “operably linked” as used herein refers to a functional linkage between the promoter sequence and the gene of interest, such that the promoter sequence is able to initiate transcription of the gene of interest.

### Constitutive Promoter

[0069] A “constitutive promoter” refers to a promoter that is transcriptionally active during most, but not necessarily all, phases of growth and development and under most environmental conditions, in at least one cell, tissue or organ. Table 2a below gives examples of constitutive promoters.

TABLE 2a
Examples of constitutive promoters

| Gene Source | Reference |
|---|---|
| Actin | McElroy et al, Plant Cell, 2: 163-171, 1990 |
| HMGP | WO 2004/070039 |
| CAMV 35S | Odell et al, Nature, 313: 810-812, 1985 |
| CaMV 19S | Nilsson et al., Physiol. Plant. 100: 456-462, 1997 |
| GOS2 | de Pater et al, Plant J Nov; 2(6): 837-44, 1992, |
| | WO 2004/065596 |
| Ubiquitin | Christensen et al, Plant Mol. Biol. 18: 675-689, 1992 |
| Rice cyclophilin | Buchholz et al, Plant Mol Biol. 25(5): 837-43, 1994 |
| Maize H3 histone | Lepetit et al, Mol. Gen. Genet. 231: 276-285, 1992 |
| Alfalfa H3 | Wu et al. Plant Mol. Biol. 11: 641-649, 1988 |
| histone | |
| Actin 2 | An et al, Plant J. 10(1); 107-121, 1996 |
| 34S FMV | Sanger et al., Plant. Mol. Biol., 14, 1990: 433-443 |
| Rubisco small | U.S. Pat. No. 4,962,028 |
| subunit | |
| OCS | Leisner (1988) Proc Natl Acad Sci USA 85(5): 2553 |
| SAD1 | Jain et al., Crop Science, 39 (6), 1999: 1696 |
| SAD2 | Jain et al., Crop Science, 39 (6), 1999: 1696 |
| nos | Shaw et al. (1984) Nucleic Acids Res. 12(20): |
| | 7831-7846 |
| V-ATPase | WO 01/14572 |
| Super promoter | WO 95/14098 |
| G-box proteins | WO 94/12015 |

### Ubiquitous Promoter

[0070] A ubiquitous promoter is active in substantially all tissues or cells of an organism.

### Developmentally-Regulated Promoter

[0071] A developmentally-regulated promoter is active during certain developmental stages or in parts of the plant that undergo developmental changes.

### Inducible Promoter

[0072] An inducible promoter has induced or increased transcription initiation in response to a chemical (for a review see Gatz 1997, Annu. Rev. Plant Physiol. Plant Mol. Biol., 48:89-108), environmental or physical stimulus, or may be “stress-inducible”, i.e. activated when a plant is exposed to various stress conditions, or a “pathogen-inducible” i.e. activated when a plant is exposed to exposure to various pathogens.

### Organ-Specific/Tissue-Specific Promoter

[0073] An organ-specific or tissue-specific promoter is one that is capable of preferentially initiating transcription in certain organs or tissues, such as the leaves, roots, seed tissue etc. For example, a “root-specific promoter” is a promoter that is transcriptionally active predominantly in plant roots, substantially to the exclusion of any other parts of a plant, whilst still allowing for any leaky expression in these other plant parts. Promoters able to initiate transcription in certain cells only are referred to herein as “cell-specific”.

[0074] Examples of root-specific promoters are listed in Table 2b below:

TABLE 2b
Examples of root-specific promoters

| Gene Source | Reference |
|---|---|
| RCc3 | Plant Mol Biol. 1995 January; 27(2): 237-48 |
| Arabidopsis PHT1 | Koyama et al. J Biosci Bioeng. 2005 January; |
| | 99(1): 38-42.; Mudge et al. (2002, Plant J. |
| | 31: 341) |
| Medicago phosphate | Xiao et al., 2006, Plant Biol (Stuttg). 2006 |
| transporter | July; 8(4): 439-49 |
| Arabidopsis Pyk10 | Nitz et al. (2001) Plant Sci 161(2): 337-346 |
| root-expressible genes | Tingey et al., EMBO J. 6: 1, 1987. |
| tobacco auxin- | Van der Zaal et al., Plant Mol. Biol. 16, |
| inducible gene | 983, 1991. |
| β-tubulin | Oppenheimer, et al., Gene 63: 87, 1988. |
| tobacco root- | Conkling, et al., Plant Physiol. 93: 1203, 1990. |
| specific genes | |
| B. napus G1-3b gene | U.S. Pat. No. 5,401,836 |
| SbPRP1 | Suzuki et al., Plant Mol. Biol. 21: 109-119, 1993. |
| LRX1 | Baumberger et al. 2001, Genes & Dev. 15: 1128 |
| BTG-26 Brassica | US 20050044585 |
| napus | |
| LeAMT1 (tomato) | Lauter et al. (1996, PNAS 3: 8139) |
| The LeNRT1-1 | Lauter et al. (1996, PNAS 3: 8139) |
| (tomato) | |
| class I patatin | Liu et al., Plant Mol. Biol. 17 (6): 1139-1154 |
| gene (potato) | |
| KDC1 (Daucus | Downey et al. (2000, J. Biol. Chem. 275: 39420) |
| carota) | |
| TobRB7 gene | W Song (1997) PhD Thesis, North Carolina State |
| | University, Raleigh, NC USA |
| OsRAB5a (rice) | Wang et al. 2002, Plant Sci. 163: 273 |
| ALF5 (Arabidopsis) | Diener et al. (2001, Plant Cell 13: 1625) |
| NRT2; 1Np (N. | Quesada et al. (1997, Plant Mol. Biol. 34: 265) |
| plumbaginifolia) | |

[0075] A seed-specific promoter is transcriptionally active predominantly in seed tissue, but not necessarily exclusively in seed tissue (in cases of leaky expression). The seed-specific promoter may be active during seed development and/or during germination. The seed specific promoter may be endosperm/aleurone/embryo specific. Examples of seed-specific promoters (endosperm/aleurone/embryo specific) are shown in Table 2c to Table 2f below. Further examples of seed-specific promoters are given in Qing Qu and Takaiwa (Plant Biotechnol. J. 2, 113-125, 2004), which disclosure is incorporated by reference herein as if fully set forth.

TABLE 2c
Examples of seed-specific promoters

| Gene source | Reference |
|---|---|
| seed-specific genes | Simon et al., Plant Mol. Biol. 5: 191, 1985; |
| | Scofield et al., J. Biol. Chem. 262: 12202, 1987.; |
| | Baszczynski et al., Plant Mol. Biol. 14: 633, 1990. |
| Brazil Nut albumin | Pearson et al., Plant Mol. Biol. 18: 235-245, 1992. |
| legumin | Ellis et al., Plant Mol. Biol. 10: 203-214, 1988. |
| glutelin (rice) | Takaiwa et al., Mol. Gen. Genet. 208: 15-22, 1986; |
| | Takaiwa et al., FEBS Letts. 221: 43-47, 1987. |
| zein | Matzke et al Plant Mol Biol, 14(3): 323-32 1990 |
| napA | Stalberg et al, Planta 199: 515-519, 1996. |
| wheat LMW and HMW | Mol Gen Genet 216: 81-90, 1989; NAR 17: 461-2, 1989 |
| glutenin-1 | |
| wheat SPA | Albani et al, Plant Cell, 9: 171-184, 1997 |
| wheat α, β, γ-gliadins | EMBO J. 3: 1409-15, 1984 |
| barley Itr1 promoter | Diaz et al. (1995) Mol Gen Genet 248(5): 592-8 |
| barley B1, C, D, hordein | Theor Appl Gen 98: 1253-62, 1999; Plant J 4: 343-55, |
| | 1993; Mol Gen Genet 250: 750-60, 1996 |
| barley DOF | Mena et al, The Plant Journal, 116(1): 53-62, 1998 |
| blz2 | EP99106056.7 |
| synthetic promoter | Vicente-Carbajosa et al., Plant J. 13: 629-640, 1998. |
| rice prolamin NRP33 | Wu et al, Plant Cell Physiology 39(8) 885-889, 1998 |
| rice a-globulin Glb-1 | Wu et al, Plant Cell Physiology 39(8) 885-889, 1998 |
| rice OSH1 | Sato et al, Proc. Natl. Acad. Sci. USA, 93: 8117-8122, |
| | 1996 |
| rice α-globulin REB/OHP-1 | Nakase et al. Plant Mol. Biol. 33: 513-522, 1997 |
| rice ADP-glucose pyrophos- | Trans Res 6: 157-68, 1997 |
| phorylase | |
| maize ESR gene family | Plant J 12: 235-46, 1997 |
| sorghum α-kafirin | DeRose et al., Plant Mol. Biol 32: 1029-35, 1996 |
| KNOX | Postma-Haarsma et al, Plant Mol. Biol. 39: 257-71, 1999 |
| rice oleosin | Wu et al, J. Biochem. 123: 386, 1998 |
| sunflower oleosin | Cummins et al., Plant Mol. Biol. 19: 873-876, 1992 |
| PRO0117, putative rice 40S | WO 2004/070039 |
| ribosomal protein | |
| PRO0136, rice alanine | unpublished |
| aminotransferase | |
| PRO0147, trypsin inhibitor | unpublished |
| ITR1 (barley) | |
| PRO0151, rice WSI18 | WO 2004/070039 |
| PRO0175, rice RAB21 | WO 2004/070039 |
| PRO005 | WO 2004/070039 |
| PRO0095 | WO 2004/070039 |
| α-amylase (Amy32b) | Lanahan et al, Plant Cell 4: 203-211, 1992; Skriver et al, |
| | Proc Natl Acad Sci USA 88: 7266-7270, 1991 |
| cathepsin β-like gene | Cejudo et al, Plant Mol Biol 20: 849-856, 1992 |
| Barley Ltp2 | Kalla et al., Plant J. 6: 849-60, 1994 |
| Chi26 | Leah et al., Plant J. 4: 579-89, 1994 |
| Maize B-Peru | Selinger et al., Genetics 149; 1125-38, 1998 |

TABLE 2d
examples of endosperm-specific promoters

| Gene source | Reference |
|---|---|
| glutelin (rice) | Takaiwa et al. (1986) Mol Gen Genet 208: 15-22; |
| | Takaiwa et al. (1987) FEBS Letts. 221: 43-47 |
| zein | Matzke et al., (1990) Plant Mol Biol 14(3): 323-32 |
| wheat LMW | Colot et al. (1989) Mol Gen Genet 216: 81-90, |
| and HMW | Anderson et al. (1989) NAR 17: 461-2 |
| glutenin-1 | |
| wheat SPA | Albani et al. (1997) Plant Cell 9: 171-184 |
| wheat gliadins | Rafalski et al. (1984) EMBO 3: 1409-15 |
| barley Itr1 | Diaz et al. (1995) Mol Gen Genet 248(5): 592-8 |
| promoter | |
| barley B1, C, D, | Cho et al. (1999) Theor Appl Genet 98: 1253-62; |
| hordein | Muller et al. (1993) Plant J 4: 343-55; |
| | Sorenson et al. (1996) Mol Gen Genet 250: 750-60 |
| barley DOF | Mena et al, (1998) Plant J 116(1): 53-62 |
| blz2 | Onate et al. (1999) J Biol Chem 274(14): 9175-82 |
| synthetic promoter | Vicente-Carbajosa et al. (1998) Plant J 13: 629-640 |
| rice prolamin | Wu et al, (1998) Plant Cell Physiol 39(8) 885-889 |
| NRP33 | |
| rice globulin | Wu et al. (1998) Plant Cell Physiol 39(8) 885-889 |
| Glb-1 | |
| rice globulin | Nakase et al. (1997) Plant Molec Biol 33: 513-522 |
| REB/OHP-1 | |
| rice ADP-glucose | Russell et al. (1997) Trans Res 6: 157-68 |
| pyrophosphorylase | |
| maize ESR | Opsahl-Ferstad et al. (1997) Plant J 12: 235-46 |
| gene family | |
| sorghum kafirin | DeRose et al. (1996) Plant Mol Biol 32: 1029-35 |

TABLE 2e
Examples of embryo specific promoters:

| Gene source | Reference |
|---|---|
| rice OSH1 | Sato et al, Proc. Natl. Acad. Sci. USA, 93: 8117-8122, |
| | 1996 |
| KNOX | Postma-Haarsma et al, Plant Mol. Biol. 39: 257-71, 1999 |
| PRO0151 | WO 2004/070039 |
| PRO0175 | WO 2004/070039 |
| PRO005 | WO 2004/070039 |
| PRO0095 | WO 2004/070039 |

TABLE 2f
Examples of aleurone-specific promoters:

| Gene source | Reference |
|---|---|
| α-amylase | Lanahan et al, Plant Cell 4: 203-211, 1992; |
| (Amy32b) | Skriver et al, Proc Natl Acad Sci USA 88: |
| | 7266-7270, 1991 |
| cathepsin β-like gene | Cejudo et al, Plant Mol Biol 20: 849-856, 1992 |
| Barley Ltp2 | Kalla et al., Plant J. 6: 849-60, 1994 |
| Chi26 | Leah et al., Plant J. 4: 579-89, 1994 |
| Maize B-Peru | Selinger et al., Genetics 149; 1125-38, 1998 |

[0076] A green tissue-specific promoter as defined herein is a promoter that is transcriptionally active predominantly in green tissue, substantially to the exclusion of any other parts of a plant, whilst still allowing for any leaky expression in these other plant parts.

[0077] Examples of green tissue-specific promoters which may be used to perform the methods of the invention are shown in Table 2g below.

TABLE 2g
Examples of green tissue-specific promoters

| Gene | Expression | Reference |
|---|---|---|
| Maize Orthophosphate | Leaf specific | Fukavama et al., Plant |
| dikinase | | Physiol. 2001 November: |
| | | 127(3): 1136-46 |
| Maize Phosphoenolpyruvate | Leaf specific | Kausch et al., Plant Mol |
| carboxylase | | Biol. 2001 January; |
| | | 45(1): 1-15 |
| Rice Phosphoenolpyruvate | Leaf specific | Lin et al., 2004 DNA |
| carboxylase | | Seq; 2004 August; 15(4): |
| | | 269-76 |
| Rice small subunit Rubisco | Leaf specific | Nomura et al., Plant Mol |
| | | Biol. 2000 September; |
| | | 44(1): 99-106 |
| rice beta expansin EXBP9 | Shoot specific | WO 2004/070039 |
| Pigeonpea small subunit | Leaf specific | Panguluri et al., Indian |
| Rubisco | | J Exp Biol. 2005 April; |
| | | 43(4): 369-72 |
| Pea RBCS3A | Leaf specific | |

[0078] Another example of a tissue-specific promoter is a meristem-specific promoter, which is transcriptionally active predominantly in meristematic tissue, substantially to the exclusion of any other parts of a plant, whilst still allowing for any leaky expression in these other plant parts. Examples of green meristem-specific promoters which may be used to perform the methods of the invention are shown in Table 2h below.

TABLE 2h
Examples of meristem-specific promoters

| Gene source | Expression pattern | Reference |
|---|---|---|
| rice OSH1 | Shoot apical meristem, | Sato et al. (1996) |
| | from embryo globular | Proc. Natl. Acad. Sci. |
| | stage to seedling stage | USA, 93: 8117-8122 |
| Rice metallothionein | Meristem specific | BAD87835.1 |
| WAK1 & WAK 2 | Shoot and root apical | Wagner & Kohorn |
| | meristems, and in ex- | (2001) Plant Cell |
| | panding leaves and sepals | 13(2): 303-318 |

### Terminator

[0079] The term “terminator” encompasses a control sequence which is a DNA sequence at the end of a transcriptional unit which signals 3′ processing and polyadenylation of a primary transcript and termination of transcription. The terminator can be derived from the natural gene, from a variety of other plant genes, or from T-DNA. The terminator to be added may be derived from, for example, the nopaline synthase or octopine synthase genes, or alternatively from another plant gene, or less preferably from any other eukaryotic gene.

### Selectable Marker (Gene)/Reporter Gene

[0080] “Selectable marker”, “selectable marker gene” or “reporter gene” includes any gene that confers a phenotype on a cell in which it is expressed to facilitate the identification and/or selection of cells that are transfected or transformed with a nucleic acid construct of the invention. These marker genes enable the identification of a successful transfer of the nucleic acid molecules via a series of different principles. Suitable markers may be selected from markers that confer antibiotic or herbicide resistance, that introduce a new metabolic trait or that allow visual selection. Examples of selectable marker genes include genes conferring resistance to antibiotics (such as nptII that phosphorylates neomycin and kanamycin, or hpt, phosphorylating hygromycin, or genes conferring resistance to, for example, bleomycin, streptomycin, tetracyclin, chloramphenicol, ampicillin, gentamycin, geneticin (G418), spectinomycin or blasticidin), to herbicides (for example bar which provides resistance to Basta®; aroA or gox providing resistance against glyphosate, or the genes conferring resistance to, for example, imidazolinone, phosphinothricin or sulfonylurea), or genes that provide a metabolic trait (such as manA that allows plants to use mannose as sole carbon source or xylose isomerase for the utilisation of xylose, or antinutritive markers such as the resistance to 2-deoxyglucose). Expression of visual marker genes results in the formation of colour (for example β-glucuronidase, GUS or β-galactosidase with its coloured substrates, for example X-Gal), luminescence (such as the luciferin/luciferase system) or fluorescence (Green Fluorescent Protein, GFP, and derivatives thereof). This list represents only a small number of possible markers. The skilled worker is familiar with such markers. Different markers are preferred, depending on the organism and the selection method.

[0081] It is known that upon stable or transient integration of nucleic acids into plant cells, only a minority of the cells takes up the foreign DNA and, if desired, integrates it into its genome, depending on the expression vector used and the transfection technique used. To identify and select these integrants, a gene coding for a selectable marker (such as the ones described above) is usually introduced into the host cells together with the gene of interest.

[0082] These markers can for example be used in mutants in which these genes are not functional by, for example, deletion by conventional methods. Furthermore, nucleic acid molecules encoding a selectable marker can be introduced into a host cell on the same vector that comprises the sequence encoding the polypeptides of the invention or used in the methods of the invention, or else in a separate vector. Cells which have been stably transfected with the introduced nucleic acid can be identified for example by selection (for example, cells which have integrated the selectable marker survive whereas the other cells die).

[0083] Since the marker genes, particularly genes for resistance to antibiotics and herbicides, are no longer required or are undesired in the transgenic host cell once the nucleic acids have been introduced successfully, the process according to the invention for introducing the nucleic acids advantageously employs techniques which enable the removal or excision of these marker genes. One such a method is what is known as co-transformation. The co-transformation method employs two vectors simultaneously for the transformation, one vector bearing the nucleic acid according to the invention and a second bearing the marker gene(s). A large proportion of transformants receives or, in the case of plants, comprises (up to 40% or more of the transformants), both vectors. In case of transformation with Agrobacteria, the transformants usually receive only a part of the vector, i.e. the sequence flanked by the T-DNA, which usually represents the expression cassette. The marker genes can subsequently be removed from the transformed plant by performing crosses. In another method, marker genes integrated into a transposon are used for the transformation together with desired nucleic acid (known as the Ac/Ds technology). The transformants can be crossed with a transposase source or the transformants are transformed with a nucleic acid construct conferring expression of a transposase, transiently or stable. In some cases (approx. 10%), the transposon jumps out of the genome of the host cell once transformation has taken place successfully and is lost. In a further number of cases, the transposon jumps to a different location. In these cases the marker gene must be eliminated by performing crosses. In microbiology, techniques were developed which make possible, or facilitate, the detection of such events. A further advantageous method relies on what is known as recombination systems; whose advantage is that elimination by crossing can be dispensed with. The best-known system of this type is what is known as the Cre/lox system. Cre1 is a recombinase that removes the sequences located between the loxP sequences. If the marker gene is integrated between the loxP sequences, it is removed once transformation has taken place successfully, by expression of the recombinase. Further recombination systems are the HIN/HIX, FLP/FRT and REP/STB system (Tribble et al., J. Biol. Chem., 275, 2000: 22255-22267; Velmurugan et al., J. Cell Biol., 149, 2000: 553-566). A site-specific integration into the plant genome of the nucleic acid sequences according to the invention is possible. Naturally, these methods can also be applied to microorganisms such as yeast, fungi or bacteria.

### Transgenic/Transgene/Recombinant

[0084] For the purposes of the invention, “transgenic”, “transgene” or “recombinant” means with regard to, for example, a nucleic acid sequence, an expression cassette, gene construct or a vector comprising the nucleic acid sequence or an organism transformed with the nucleic acid sequences, expression cassettes or vectors according to the invention, all those constructions brought about by recombinant methods in which either
[0085] (a) the nucleic acid sequences encoding proteins useful in the methods of the invention, or
[0086] (b) genetic control sequence(s) which is operably linked with the nucleic acid sequence according to the invention, for example a promoter, or
[0087] (c) a) and b)
   are not located in their natural genetic environment or have been modified by recombinant methods, it being possible for the modification to take the form of, for example, a substitution, addition, deletion, inversion or insertion of one or more nucleotide residues. The natural genetic environment is understood as meaning the natural genomic or chromosomal locus in the original plant or the presence in a genomic library. In the case of a genomic library, the natural genetic environment of the nucleic acid sequence is preferably retained, at least in part. The environment flanks the nucleic acid sequence at least on one side and has a sequence length of at least 50 bp, preferably at least 500 bp, especially preferably at least 1000 bp, most preferably at least 5000 bp. A naturally occurring expression cassette—for example the naturally occurring combination of the natural promoter of the nucleic acid sequences with the corresponding nucleic acid sequence encoding a polypeptide useful in the methods of the present invention, as defined above—becomes a transgenic expression cassette when this expression cassette is modified by non-natural, synthetic (“artificial”) methods such as, for example, mutagenic treatment. Suitable methods are described, for example, in U.S. Pat. No. 5,565,350 or WO 00/15815.

[0088] A transgenic plant for the purposes of the invention is thus understood as meaning, as above, that the nucleic acids used in the method of the invention are not present in, or originating from, the genome of said plant, or are present in the genome of said plant but not at their natural locus in the genome of said plant, it being possible for the nucleic acids to be expressed homologously or heterologously. However, as mentioned, transgenic also means that, while the nucleic acids according to the invention or used in the inventive method are at their natural position in the genome of a plant, the sequence has been modified with regard to the natural sequence, and/or that the regulatory sequences of the natural sequences have been modified. Transgenic is preferably understood as meaning the expression of the nucleic acids according to the invention at an unnatural locus in the genome, i.e. homologous or, preferably, heterologous expression of the nucleic acids takes place. Preferred transgenic plants are mentioned herein.

[0089] It shall further be noted that in the context of the present invention, the term “isolated nucleic acid” or “isolated polypeptide” may in some instances be considered as a synonym for a “recombinant nucleic acid” or a “recombinant polypeptide”, respectively and refers to a nucleic acid or polypeptide that is not located in its natural genetic environment and/or that has been modified by recombinant methods.

### Modulation

[0090] The term “modulation” means in relation to expression or gene expression, a process in which the expression level is changed by said gene expression in comparison to the control plant, the expression level may be increased or decreased. The original, unmodulated expression may be of any kind of expression of a structural RNA (rRNA, tRNA) or mRNA with subsequent translation. For the purposes of this invention, the original unmodulated expression may also be absence of any expression. The term “modulating the activity” shall mean any change of the expression of the inventive nucleic acid sequences or encoded proteins, which leads to increased yield and/or increased growth of the plants. The expression can increase from zero (absence of, or immeasurable expression) to a certain amount, or can decrease from a certain amount to immeasurable small amounts or zero.

### Expression

[0091] The term “expression” or “gene expression” means the transcription of a specific gene or specific genes or specific genetic construct. The term “expression” or “gene expression” in particular means the transcription of a gene or genes or genetic construct into structural RNA (rRNA, tRNA) or mRNA with or without subsequent translation of the latter into a protein. The process includes transcription of DNA and processing of the resulting mRNA product.

### Increased Expression/Overexpression

[0092] The term “increased expression” or “overexpression” as used herein means any form of expression that is additional to the original wild-type expression level. For the purposes of this invention, the original wild-type expression level might also be zero, i.e. absence of expression or immeasurable expression.

[0093] Methods for increasing expression of genes or gene products are well documented in the art and include, for example, overexpression driven by appropriate promoters, the use of transcription enhancers or translation enhancers. Isolated nucleic acids which serve as promoter or enhancer elements may be introduced in an appropriate position (typically upstream) of a non-heterologous form of a polynucleotide so as to upregulate expression of a nucleic acid encoding the polypeptide of interest. For example, endogenous promoters may be altered in vivo by mutation, deletion, and/or substitution (see, Kmiec, U.S. Pat. No. 5,565,350; Zarling et al., WO9322443), or isolated promoters may be introduced into a plant cell in the proper orientation and distance from a gene of the present invention so as to control the expression of the gene.

[0094] If polypeptide expression is desired, it is generally desirable to include a polyadenylation region at the 3′-end of a polynucleotide coding region. The polyadenylation region can be derived from the natural gene, from a variety of other plant genes, or from T-DNA. The 3′ end sequence to be added may be derived from, for example, the nopaline synthase or octopine synthase genes, or alternatively from another plant gene, or less preferably from any other eukaryotic gene.

[0095] An intron sequence may also be added to the 5′ untranslated region (UTR) or the coding sequence of the partial coding sequence to increase the amount of the mature message that accumulates in the cytosol. Inclusion of a spliceable intron in the transcription unit in both plant and animal expression constructs has been shown to increase gene expression at both the mRNA and protein levels up to 1000-fold (Buchman and Berg (1988) Mol. Cell. biol. 8: 4395-4405; Callis et al. (1987) Genes Dev 1:1183-1200). Such intron enhancement of gene expression is typically greatest when placed near the 5′ end of the transcription unit. Use of the maize introns Adh1-S intron 1, 2, and 6, the Bronze-1 intron are known in the art. For general information see: The Maize Handbook, Chapter 116, Freeling and Walbot, Eds., Springer, N.Y. (1994).

### Decreased Expression

[0096] Reference herein to “decreased expression” or “reduction or substantial elimination” of expression is taken to mean a decrease in endogenous gene expression and/or polypeptide levels and/or polypeptide activity relative to control plants. The reduction or substantial elimination is in increasing order of preference at least 10%, 20%, 30%, 40% or 50%, 60%, 70%, 80%, 85%, 90%, or 95%, 96%, 97%, 98%, 99% or more reduced compared to that of control plants.

[0097] For the reduction or substantial elimination of expression an endogenous gene in a plant, a sufficient length of substantially contiguous nucleotides of a nucleic acid sequence is required. In order to perform gene silencing, this may be as little as 20, 19, 18, 17, 16, 15, 14, 13, 12, 11, 10 or fewer nucleotides, alternatively this may be as much as the entire gene (including the 5′ and/or 3′ UTR, either in part or in whole). The stretch of substantially contiguous nucleotides may be derived from the nucleic acid encoding the protein of interest (target gene), or from any nucleic acid capable of encoding an orthologue, paralogue or homologue of the protein of interest. Preferably, the stretch of substantially contiguous nucleotides is capable of forming hydrogen bonds with the target gene (either sense or antisense strand), more preferably, the stretch of substantially contiguous nucleotides has, in increasing order of preference, 50%, 60%, 70%, 80%, 85%, 90%, 95%, 96%, 97%, 98%, 99%, 100% sequence identity to the target gene (either sense or antisense strand). A nucleic acid sequence encoding a (functional) polypeptide is not a requirement for the various methods discussed herein for the reduction or substantial elimination of expression of an endogenous gene.

[0098] This reduction or substantial elimination of expression may be achieved using routine tools and techniques. A preferred method for the reduction or substantial elimination of endogenous gene expression is by introducing and expressing in a plant a genetic construct into which the nucleic acid (in this case a stretch of substantially contiguous nucleotides derived from the gene of interest, or from any nucleic acid capable of encoding an orthologue, paralogue or homologue of any one of the protein of interest) is cloned as an inverted repeat (in part or completely), separated by a spacer (non-coding DNA).

[0099] In such a preferred method, expression of the endogenous gene is reduced or substantially eliminated through RNA-mediated silencing using an inverted repeat of a nucleic acid or a part thereof (in this case a stretch of substantially contiguous nucleotides derived from the gene of interest, or from any nucleic acid capable of encoding an orthologue, paralogue or homologue of the protein of interest), preferably capable of forming a hairpin structure. The inverted repeat is cloned in an expression vector comprising control sequences. A non-coding DNA nucleic acid sequence (a spacer, for example a matrix attachment region fragment (MAR), an intron, a polylinker, etc.) is located between the two inverted nucleic acids forming the inverted repeat. After transcription of the inverted repeat, a chimeric RNA with a self-complementary structure is formed (partial or complete). This double-stranded RNA structure is referred to as the hairpin RNA (hpRNA). The hpRNA is processed by the plant into siRNAs that are incorporated into an RNA-induced silencing complex (RISC). The RISC further cleaves the mRNA transcripts, thereby substantially reducing the number of mRNA transcripts to be translated into polypeptides. For further general details see for example, Grierson et al. (1998) WO 98/53083; Waterhouse et al. (1999) WO 99/53050).

[0100] Performance of the methods of the invention does not rely on introducing and expressing in a plant a genetic construct into which the nucleic acid is cloned as an inverted repeat, but any one or more of several well-known “gene silencing” methods may be used to achieve the same effects.

[0101] One such method for the reduction of endogenous gene expression is RNA-mediated silencing of gene expression (downregulation). Silencing in this case is triggered in a plant by a double stranded RNA sequence (dsRNA) that is substantially similar to the target endogenous gene. This dsRNA is further processed by the plant into about 20 to about 26 nucleotides called short interfering RNAs (siRNAs). The siRNAs are incorporated into an RNA-induced silencing complex (RISC) that cleaves the mRNA transcript of the endogenous target gene, thereby substantially reducing the number of mRNA transcripts to be translated into a polypeptide. Preferably, the double stranded RNA sequence corresponds to a target gene.

[0102] Another example of an RNA silencing method involves the introduction of nucleic acid sequences or parts thereof (in this case a stretch of substantially contiguous nucleotides derived from the gene of interest, or from any nucleic acid capable of encoding an orthologue, paralogue or homologue of the protein of interest) in a sense orientation into a plant. “Sense orientation” refers to a DNA sequence that is homologous to an mRNA transcript thereof. Introduced into a plant would therefore be at least one copy of the nucleic acid sequence. The additional nucleic acid sequence will reduce expression of the endogenous gene, giving rise to a phenomenon known as co-suppression. The reduction of gene expression will be more pronounced if several additional copies of a nucleic acid sequence are introduced into the plant, as there is a positive correlation between high transcript levels and the triggering of co-suppression.

[0103] Another example of an RNA silencing method involves the use of antisense nucleic acid sequences. An “antisense” nucleic acid sequence comprises a nucleotide sequence that is complementary to a “sense” nucleic acid sequence encoding a protein, i.e. complementary to the coding strand of a double-stranded cDNA molecule or complementary to an mRNA transcript sequence. The antisense nucleic acid sequence is preferably complementary to the endogenous gene to be silenced. The complementarity may be located in the “coding region” and/or in the “non-coding region” of a gene. The term “coding region” refers to a region of the nucleotide sequence comprising codons that are translated into amino acid residues. The term “non-coding region” refers to 5′ and 3′ sequences that flank the coding region that are transcribed but not translated into amino acids (also referred to as 5′ and 3′ untranslated regions).

[0104] Antisense nucleic acid sequences can be designed according to the rules of Watson and Crick base pairing. The antisense nucleic acid sequence may be complementary to the entire nucleic acid sequence (in this case a stretch of substantially contiguous nucleotides derived from the gene of interest, or from any nucleic acid capable of encoding an orthologue, paralogue or homologue of the protein of interest), but may also be an oligonucleotide that is antisense to only a part of the nucleic acid sequence (including the mRNA 5′ and 3′ UTR). For example, the antisense oligonucleotide sequence may be complementary to the region surrounding the translation start site of an mRNA transcript encoding a polypeptide. The length of a suitable antisense oligonucleotide sequence is known in the art and may start from about 50, 45, 40, 35, 30, 25, 20, 15 or 10 nucleotides in length or less. An antisense nucleic acid sequence according to the invention may be constructed using chemical synthesis and enzymatic ligation reactions using methods known in the art. For example, an antisense nucleic acid sequence (e.g., an antisense oligonucleotide sequence) may be chemically synthesized using naturally occurring nucleotides or variously modified nucleotides designed to increase the biological stability of the molecules or to increase the physical stability of the duplex formed between the antisense and sense nucleic acid sequences, e.g., phosphorothioate derivatives and acridine substituted nucleotides may be used. Examples of modified nucleotides that may be used to generate the antisense nucleic acid sequences are well known in the art. Known nucleotide modifications include methylation, cyclization and ‘caps’ and substitution of one or more of the naturally occurring nucleotides with an analogue such as inosine. Other modifications of nucleotides are well known in the art.

[0105] The antisense nucleic acid sequence can be produced biologically using an expression vector into which a nucleic acid sequence has been subcloned in an antisense orientation (i.e., RNA transcribed from the inserted nucleic acid will be of an antisense orientation to a target nucleic acid of interest). Preferably, production of antisense nucleic acid sequences in plants occurs by means of a stably integrated nucleic acid construct comprising a promoter, an operably linked antisense oligonucleotide, and a terminator.

[0106] The nucleic acid molecules used for silencing in the methods of the invention (whether introduced into a plant or generated in situ) hybridize with or bind to mRNA transcripts and/or genomic DNA encoding a polypeptide to thereby inhibit expression of the protein, e.g., by inhibiting transcription and/or translation. The hybridization can be by conventional nucleotide complementarity to form a stable duplex, or, for example, in the case of an antisense nucleic acid sequence which binds to DNA duplexes, through specific interactions in the major groove of the double helix. Antisense nucleic acid sequences may be introduced into a plant by transformation or direct injection at a specific tissue site. Alternatively, antisense nucleic acid sequences can be modified to target selected cells and then administered systemically. For example, for systemic administration, antisense nucleic acid sequences can be modified such that they specifically bind to receptors or antigens expressed on a selected cell surface, e.g., by linking the antisense nucleic acid sequence to peptides or antibodies which bind to cell surface receptors or antigens. The antisense nucleic acid sequences can also be delivered to cells using the vectors described herein.

[0107] According to a further aspect, the antisense nucleic acid sequence is an a-anomeric nucleic acid sequence. An a-anomeric nucleic acid sequence forms specific double-stranded hybrids with complementary RNA in which, contrary to the usual b-units, the strands run parallel to each other (Gaultier et al. (1987) Nucl Ac Res 15: 6625-6641). The antisense nucleic acid sequence may also comprise a 2′-o-methylribonucleotide (Inoue et al. (1987) Nucl Ac Res 15, 6131-6148) or a chimeric RNA-DNA analogue (Inoue et al. (1987) FEBS Lett. 215, 327-330).

[0108] The reduction or substantial elimination of endogenous gene expression may also be performed using ribozymes. Ribozymes are catalytic RNA molecules with ribonuclease activity that are capable of cleaving a single-stranded nucleic acid sequence, such as an mRNA, to which they have a complementary region. Thus, ribozymes (e.g., hammerhead ribozymes (described in Haselhoff and Gerlach (1988) Nature 334, 585-591) can be used to catalytically cleave mRNA transcripts encoding a polypeptide, thereby substantially reducing the number of mRNA transcripts to be translated into a polypeptide. A ribozyme having specificity for a nucleic acid sequence can be designed (see for example: Cech et al. U.S. Pat. No. 4,987,071; and Cech et al. U.S. Pat. No. 5,116,742). Alternatively, mRNA transcripts corresponding to a nucleic acid sequence can be used to select a catalytic RNA having a specific ribonuclease activity from a pool of RNA molecules (Bartel and Szostak (1993) Science 261, 1411-1418). The use of ribozymes for gene silencing in plants is known in the art (e.g., Atkins et al. (1994) WO 94/00012; Lenne et al. (1995) WO 95/03404; Lutziger et al. (2000) WO 00/00619; Prinsen et al. (1997) WO 97/13865 and Scott et al. (1997) WO 97/38116).

[0109] Gene silencing may also be achieved by insertion mutagenesis (for example, T-DNA insertion or transposon insertion) or by strategies as described by, among others, Angell and Baulcombe ((1999) Plant J 20(3): 357-62), (Amplicon VIGS WO 98/36083), or Baulcombe (WO 99/15682).

[0110] Gene silencing may also occur if there is a mutation on an endogenous gene and/or a mutation on an isolated gene/nucleic acid subsequently introduced into a plant. The reduction or substantial elimination may be caused by a non-functional polypeptide. For example, the polypeptide may bind to various interacting proteins; one or more mutation(s) and/or truncation(s) may therefore provide for a polypeptide that is still able to bind interacting proteins (such as receptor proteins) but that cannot exhibit its normal function (such as signalling ligand).

[0111] A further approach to gene silencing is by targeting nucleic acid sequences complementary to the regulatory region of the gene (e.g., the promoter and/or enhancers) to form triple helical structures that prevent transcription of the gene in target cells. See Helene, C., Anticancer Drug Res. 6, 569-84, 1991; Helene et al., Ann. N.Y. Acad. Sci. 660, 27-36 1992; and Maher, L. J. Bioassays 14, 807-15, 1992.

[0112] Other methods, such as the use of antibodies directed to an endogenous polypeptide for inhibiting its function in planta, or interference in the signalling pathway in which a polypeptide is involved, will be well known to the skilled man. In particular, it can be envisaged that manmade molecules may be useful for inhibiting the biological function of a target polypeptide, or for interfering with the signalling pathway in which the target polypeptide is involved.

[0113] Alternatively, a screening program may be set up to identify in a plant population natural variants of a gene, which variants encode polypeptides with reduced activity. Such natural variants may also be used for example, to perform homologous recombination.

[0114] Artificial and/or natural microRNAs (miRNAs) may be used to knock out gene expression and/or mRNA translation. Endogenous miRNAs are single stranded small RNAs of typically 19-24 nucleotides long. They function primarily to regulate gene expression and/or mRNA translation. Most plant microRNAs (miRNAs) have perfect or near-perfect complementarity with their target sequences. However, there are natural targets with up to five mismatches. They are processed from longer non-coding RNAs with characteristic fold-back structures by double-strand specific RNases of the Dicer family. Upon processing, they are incorporated in the RNA-induced silencing complex (RISC) by binding to its main component, an Argonaute protein. miRNAs serve as the specificity components of RISC, since they base-pair to target nucleic acids, mostly mRNAs, in the cytoplasm. Subsequent regulatory events include target mRNA cleavage and destruction and/or translational inhibition. Effects of miRNA overexpression are thus often reflected in decreased mRNA levels of target genes.

[0115] Artificial microRNAs (amiRNAs), which are typically 21 nucleotides in length, can be genetically engineered specifically to negatively regulate gene expression of single or multiple genes of interest. Determinants of plant microRNA target selection are well known in the art. Empirical parameters for target recognition have been defined and can be used to aid in the design of specific amiRNAs, (Schwab et al., Dev. Cell 8, 517-527, 2005). Convenient tools for design and generation of amiRNAs and their precursors are also available to the public (Schwab et al., Plant Cell 18, 1121-1133, 2006).

[0116] For optimal performance, the gene silencing techniques used for reducing expression in a plant of an endogenous gene requires the use of nucleic acid sequences from monocotyledonous plants for transformation of monocotyledonous plants, and from dicotyledonous plants for transformation of dicotyledonous plants. Preferably, a nucleic acid sequence from any given plant species is introduced into that same species. For example, a nucleic acid sequence from rice is transformed into a rice plant. However, it is not an absolute requirement that the nucleic acid sequence to be introduced originates from the same plant species as the plant in which it will be introduced. It is sufficient that there is substantial homology between the endogenous target gene and the nucleic acid to be introduced.

[0117] Described above are examples of various methods for the reduction or substantial elimination of expression in a plant of an endogenous gene. A person skilled in the art would readily be able to adapt the aforementioned methods for silencing so as to achieve reduction of expression of an endogenous gene in a whole plant or in parts thereof through the use of an appropriate promoter, for example.

### Transformation

[0118] The term “introduction” or “transformation” as referred to herein encompasses the transfer of an exogenous polynucleotide into a host cell, irrespective of the method used for transfer. Plant tissue capable of subsequent clonal propagation, whether by organogenesis or embryogenesis, may be transformed with a genetic construct of the present invention and a whole plant regenerated there from. The particular tissue chosen will vary depending on the clonal propagation systems available for, and best suited to, the particular species being transformed. Exemplary tissue targets include leaf disks, pollen, embryos, cotyledons, hypocotyls, megagametophytes, callus tissue, existing meristematic tissue (e.g., apical meristem, axillary buds, and root meristems), and induced meristem tissue (e.g., cotyledon meristem and hypocotyl meristem). The polynucleotide may be transiently or stably introduced into a host cell and may be maintained non-integrated, for example, as a plasmid. Alternatively, it may be integrated into the host genome. The resulting transformed plant cell may then be used to regenerate a transformed plant in a manner known to persons skilled in the art.

[0119] The transfer of foreign genes into the genome of a plant is called transformation. Transformation of plant species is now a fairly routine technique. Advantageously, any of several transformation methods may be used to introduce the gene of interest into a suitable ancestor cell. The methods described for the transformation and regeneration of plants from plant tissues or plant cells may be utilized for transient or for stable transformation. Transformation methods include the use of liposomes, electroporation, chemicals that increase free DNA uptake, injection of the DNA directly into the plant, particle gun bombardment, transformation using viruses or pollen and microprojection. Methods may be selected from the calcium/polyethylene glycol method for protoplasts (Krens, F. A. et al., (1982) Nature 296, 72-74; Negrutiu I et al. (1987) Plant Mol Biol 8: 363-373); electroporation of protoplasts (Shillito R. D. et al. (1985) Bio/Technol 3, 1099-1102); microinjection into plant material (Crossway A et al., (1986) Mol. Gen. Genet. 202: 179-185); DNA or RNA-coated particle bombardment (Klein T M et al., (1987) Nature 327: 70) infection with (non-integrative) viruses and the like. Transgenic plants, including transgenic crop plants, are preferably produced via Agrobacterium-mediated transformation. An advantageous transformation method is the transformation in planta. To this end, it is possible, for example, to allow the agrobacteria to act on plant seeds or to inoculate the plant meristem with agrobacteria. It has proved particularly expedient in accordance with the invention to allow a suspension of transformed agrobacteria to act on the intact plant or at least on the flower primordia. The plant is subsequently grown on until the seeds of the treated plant are obtained (Clough and Bent, Plant J. (1998) 16, 735-743). Methods for Agrobacterium-mediated transformation of rice include well known methods for rice transformation, such as those described in any of the following: European patent application EP 1198985 A1, Aldemita and Hodges (Planta 199: 612-617, 1996); Chan et al. (Plant Mol Biol 22 (3): 491-506, 1993), Hiei et al. (Plant J 6 (2): 271-282, 1994), which disclosures are incorporated by reference herein as if fully set forth. In the case of corn transformation, the preferred method is as described in either Ishida et al. (Nat. Biotechnol 14(6): 745-50, 1996) or Frame et al. (Plant Physiol 129(1): 13-22, 2002), which disclosures are incorporated by reference herein as if fully set forth. Said methods are further described by way of example in B. Jenes et al., Techniques for Gene Transfer, in: Transgenic Plants, Vol. 1, Engineering and Utilization, eds. S. D. Kung and R. Wu, Academic Press (1993) 128-143 and in Potrykus Annu. Rev. Plant Physiol. Plant Molec. Biol. 42 (1991) 205-225). The nucleic acids or the construct to be expressed is preferably cloned into a vector, which is suitable for transforming Agrobacterium tumefaciens, for example pBin19 (Bevan et al., Nucl. Acids Res. 12 (1984) 8711). Agrobacteria transformed by such a vector can then be used in known manner for the transformation of plants, such as plants used as a model, like Arabidopsis (Arabidopsis thaliana is within the scope of the present invention not considered as a crop plant), or crop plants such as, by way of example, tobacco plants, for example by immersing bruised leaves or chopped leaves in an agrobacterial solution and then culturing them in suitable media. The transformation of plants by means of Agrobacterium tumefaciens is described, for example, by Höfgen and Willmitzer in Nucl. Acid Res. (1988) 16, 9877 or is known inter alia from F. F. White, Vectors for Gene Transfer in Higher Plants; in Transgenic Plants, Vol. 1, Engineering and Utilization, eds. S. D. Kung and R. Wu, Academic Press, 1993, pp. 15-38.

[0120] In addition to the transformation of somatic cells, which then have to be regenerated into intact plants, it is also possible to transform the cells of plant meristems and in particular those cells which develop into gametes. In this case, the transformed gametes follow the natural plant development, giving rise to transgenic plants. Thus, for example, seeds of Arabidopsis are treated with agrobacteria and seeds are obtained from the developing plants of which a certain proportion is transformed and thus transgenic [Feldman, K A and Marks M D (1987). Mol Gen Genet. 208:1-9; Feldmann K (1992). In: C Koncz, N-H Chua and J Shell, eds, Methods in Arabidopsis Research. Word Scientific, Singapore, pp. 274-289]. Alternative methods are based on the repeated removal of the inflorescences and incubation of the excision site in the center of the rosette with transformed agrobacteria, whereby transformed seeds can likewise be obtained at a later point in time (Chang (1994). Plant J. 5: 551-558; Katavic (1994). Mol Gen Genet, 245: 363-370). However, an especially effective method is the vacuum infiltration method with its modifications such as the “floral dip” method. In the case of vacuum infiltration of Arabidopsis, intact plants under reduced pressure are treated with an agrobacterial suspension [Bechthold, N (1993). C R Acad Sci Paris Life Sci, 316: 1194-1199], while in the case of the “floral dip” method the developing floral tissue is incubated briefly with a surfactant-treated agrobacterial suspension [Clough, S J and Bent A F (1998) The Plant J. 16, 735-743]. A certain proportion of transgenic seeds are harvested in both cases, and these seeds can be distinguished from non-transgenic seeds by growing under the above-described selective conditions. In addition the stable transformation of plastids is of advantages because plastids are inherited maternally is most crops reducing or eliminating the risk of transgene flow through pollen. The transformation of the chloroplast genome is generally achieved by a process which has been schematically displayed in Klaus et al., 2004 [Nature Biotechnology 22 (2), 225-229]. Briefly the sequences to be transformed are cloned together with a selectable marker gene between flanking sequences homologous to the chloroplast genome. These homologous flanking sequences direct site specific integration into the plastome. Plastidal transformation has been described for many different plant species and an overview is given in Bock (2001) Transgenic plastids in basic research and plant biotechnology. J Mol. Biol. 2001 Sep. 21; 312 (3):425-38 or Maliga, P (2003) Progress towards commercialization of plastid transformation technology. Trends Biotechnol. 21, 20-28. Further biotechnological progress has recently been reported in form of marker free plastid transformants, which can be produced by a transient co-integrated maker gene (Klaus et al., 2004, Nature Biotechnology 22(2), 225-229).

[0121] The genetically modified plant cells can be regenerated via all methods with which the skilled worker is familiar. Suitable methods can be found in the above-mentioned publications by S. D. Kung and R. Wu, Potrykus or Höfgen and Willmitzer.

[0122] Generally after transformation, plant cells or cell groupings are selected for the presence of one or more markers which are encoded by plant-expressible genes co-transferred with the gene of interest, following which the transformed material is regenerated into a whole plant. To select transformed plants, the plant material obtained in the transformation is, as a rule, subjected to selective conditions so that transformed plants can be distinguished from untransformed plants. For example, the seeds obtained in the above-described manner can be planted and, after an initial growing period, subjected to a suitable selection by spraying. A further possibility consists in growing the seeds, if appropriate after sterilization, on agar plates using a suitable selection agent so that only the transformed seeds can grow into plants. Alternatively, the transformed plants are screened for the presence of a selectable marker such as the ones described above.

[0123] Following DNA transfer and regeneration, putatively transformed plants may also be evaluated, for instance using Southern analysis, for the presence of the gene of interest, copy number and/or genomic organisation. Alternatively or additionally, expression levels of the newly introduced DNA may be monitored using Northern and/or Western analysis, both techniques being well known to persons having ordinary skill in the art.

[0124] The generated transformed plants may be propagated by a variety of means, such as by clonal propagation or classical breeding techniques. For example, a first generation (or T1) transformed plant may be selfed and homozygous second-generation (or T2) transformants selected, and the T2 plants may then further be propagated through classical breeding techniques. The generated transformed organisms may take a variety of forms. For example, they may be chimeras of transformed cells and non-transformed cells; clonal transformants (e.g., all cells transformed to contain the expression cassette); grafts of transformed and untransformed tissues (e.g., in plants, a transformed rootstock grafted to an untransformed scion).

### T-DNA Activation Tagging

[0125] T-DNA activation tagging (Hayashi et al. Science (1992) 1350-1353), involves insertion of T-DNA, usually containing a promoter (may also be a translation enhancer or an intron), in the genomic region of the gene of interest or 10 kb up- or downstream of the coding region of a gene in a configuration such that the promoter directs expression of the targeted gene. Typically, regulation of expression of the targeted gene by its natural promoter is disrupted and the gene falls under the control of the newly introduced promoter. The promoter is typically embedded in a T-DNA. This T-DNA is randomly inserted into the plant genome, for example, through Agrobacterium infection and leads to modified expression of genes near the inserted T-DNA. The resulting transgenic plants show dominant phenotypes due to modified expression of genes close to the introduced promoter.

### TILLING

[0126] The term “TILLING” is an abbreviation of “Targeted Induced Local Lesions In Genomes” and refers to a mutagenesis technology useful to generate and/or identify nucleic acids encoding proteins with modified expression and/or activity. TILLING also allows selection of plants carrying such mutant variants. These mutant variants may exhibit modified expression, either in strength or in location or in timing (if the mutations affect the promoter for example). These mutant variants may exhibit higher activity than that exhibited by the gene in its natural form. TILLING combines high-density mutagenesis with high-throughput screening methods. The steps typically followed in TILLING are: (a) EMS mutagenesis (Redei GP and Koncz C (1992) In Methods in Arabidopsis Research, Koncz C, Chua N H, Schell J, eds. Singapore, World Scientific Publishing Co, pp. 16-82; Feldmann et al., (1994) In Meyerowitz E M, Somerville C R, eds, Arabidopsis. Cold Spring Harbor Laboratory Press, Cold Spring Harbor, N.Y., pp 137-172; Lightner J and Caspar T (1998) In J Martinez-Zapater, J Salinas, eds, Methods on Molecular Biology, Vol. 82. Humana Press, Totowa, N.J., pp 91-104); (b) DNA preparation and pooling of individuals; (c) PCR amplification of a region of interest; (d) denaturation and annealing to allow formation of heteroduplexes; (e) DHPLC, where the presence of a heteroduplex in a pool is detected as an extra peak in the chromatogram; (f) identification of the mutant individual; and (g) sequencing of the mutant PCR product. Methods for TILLING are well known in the art (McCallum et al., (2000) Nat Biotechnol 18: 455-457; reviewed by Stemple (2004) Nat Rev Genet. 5(2): 145-50).

### Homologous Recombination

[0127] Homologous recombination allows introduction in a genome of a selected nucleic acid at a defined selected position. Homologous recombination is a standard technology used routinely in biological sciences for lower organisms such as yeast or the moss Physcomitrella. Methods for performing homologous recombination in plants have been described not only for model plants (Offring a et al. (1990) EMBO J. 9(10): 3077-84) but also for crop plants, for example rice (Terada et al. (2002) Nat Biotech 20(10): 1030-4; lida and Terada (2004) Curr Opin Biotech 15(2): 132-8), and approaches exist that are generally applicable regardless of the target organism (Miller et al, Nature Biotechnol. 25, 778-785, 2007).

### Yield Related Traits

[0128] Yield related traits are traits or features which are related to plant yield. Yield-related traits may comprise one or more of the following non-limitative list of features: early flowering time, yield, biomass, seed yield, early vigour, greenness index, increased growth rate, improved agronomic traits, such as e.g. improved Water Use Efficiency (WUE), improved Nitrogen Use Efficiency (NUE), etc.

### Yield

[0129] The term “yield” in general means a measurable produce of economic value, typically related to a specified crop, to an area, and to a period of time. Individual plant parts directly contribute to yield based on their number, size and/or weight, or the actual yield is the yield per square meter for a crop and year, which is determined by dividing total production (includes both harvested and appraised production) by planted square meters.

[0130] The terms “yield” of a plant and “plant yield” are used interchangeably herein and are meant to refer to vegetative biomass such as root and/or shoot biomass, to reproductive organs, and/or to propagules such as seeds of that plant.

[0131] Taking corn as an example, male inflorescences (tassels) and female inflorescences (ears). The female inflorescence produces pairs of spikelets on the surface of a central axis (cob). Each of the female spikelets encloses two fertile florests, one of whose will usually mature into a maize kernel once fertilized. Hence a yield increase in maize may be manifested as one or more of the following: increase in the number of plants established per square meter, an increase in the number of ears per plant, an increase in the number of rows, number of kernels per row, kernel weight, thousand kernel weight, ear length/diameter, increase in the seed filling rate, which is the number of filled florets (i.e. florets containing seed) divided by the total number of florets and multiplied by 100), among others.

[0132] Inflorescences in rice plants are called panicles. The panicle bears spikelets. The spikelet is the basic unit of the panicles and consists of a pedicel and a floret. The floret is born on the pedicel. A floret includes a flower that is covered by two protective glumes: a larger glume (the lemma) and a shorter glume (the palea). Hence, taking rice as an example, a yield increase may manifest itself as an increase in one or more of the following: number of plants per square meter, number of panicles per plant, panicle length, number of spikelets per panicle, number of flowers (or florets) per panicle, increase in the seed filling rate which is the number of filled florets (i.e. florets containing seeds divided by the total number of florets and multiplied by 100), increase in thousand kernel weight, among others. In rice, submergence tolerance may also result in increased yield.

### Early Flowering Time

[0133] Plants having an “early flowering time” as used herein are plants which start to flower earlier than control plants. Hence this term refers to plants that show an earlier start of flowering. Flowering time of plants can be assessed by counting the number of days (“time to flower”) between sowing and the emergence of a first inflorescence. The “flowering time” of a plant can for instance be determined using the method as described in WO 2007/093444.

### Early Vigour

[0134] “Early vigour” refers to active healthy well-balanced growth especially during early stages of plant growth, and may result from increased plant fitness due to, for example, the plants being better adapted to their environment (i.e. optimizing the use of energy resources and partitioning between shoot and root). Plants having early vigour also show increased seedling survival and a better establishment of the crop, which often results in highly uniform fields (with the crop growing in uniform manner, i.e. with the majority of plants reaching the various stages of development at substantially the same time), and often better and higher yield. Therefore, early vigour may be determined by measuring various factors, such as thousand kernel weight, percentage germination, percentage emergence, seedling growth, seedling height, root length, root and shoot biomass and many more.

### Increased Growth Rate

[0135] The increased growth rate may be specific to one or more parts of a plant (including seeds), or may be throughout substantially the whole plant. Plants having an increased growth rate may have a shorter life cycle. The life cycle of a plant may be taken to mean the time needed to grow from a dry mature seed up to the stage where the plant has produced dry mature seeds, similar to the starting material. This life cycle may be influenced by factors such as speed of germination, early vigour, growth rate, greenness index, flowering time and speed of seed maturation. The increase in growth rate may take place at one or more stages in the life cycle of a plant or during substantially the whole plant life cycle. Increased growth rate during the early stages in the life cycle of a plant may reflect enhanced vigour. The increase in growth rate may alter the harvest cycle of a plant allowing plants to be sown later and/or harvested sooner than would otherwise be possible (a similar effect may be obtained with earlier flowering time). If the growth rate is sufficiently increased, it may allow for the further sowing of seeds of the same plant species (for example sowing and harvesting of rice plants followed by sowing and harvesting of further rice plants all within one conventional growing period). Similarly, if the growth rate is sufficiently increased, it may allow for the further sowing of seeds of different plants species (for example the sowing and harvesting of corn plants followed by, for example, the sowing and optional harvesting of soybean, potato or any other suitable plant). Harvesting additional times from the same rootstock in the case of some crop plants may also be possible. Altering the harvest cycle of a plant may lead to an increase in annual biomass production per square meter (due to an increase in the number of times (say in a year) that any particular plant may be grown and harvested). An increase in growth rate may also allow for the cultivation of transgenic plants in a wider geographical area than their wild-type counterparts, since the territorial limitations for growing a crop are often determined by adverse environmental conditions either at the time of planting (early season) or at the time of harvesting (late season). Such adverse conditions may be avoided if the harvest cycle is shortened. The growth rate may be determined by deriving various parameters from growth curves, such parameters may be: T-Mid (the time taken for plants to reach 50% of their maximal size) and T-90 (time taken for plants to reach 90% of their maximal size), amongst others.

### Stress Resistance

[0136] An increase in yield and/or growth rate occurs whether the plant is under non-stress conditions or whether the plant is exposed to various stresses compared to control plants. Plants typically respond to exposure to stress by growing more slowly. In conditions of severe stress, the plant may even stop growing altogether. Mild stress on the other hand is defined herein as being any stress to which a plant is exposed which does not result in the plant ceasing to grow altogether without the capacity to resume growth. Mild stress in the sense of the invention leads to a reduction in the growth of the stressed plants of less than 40%, 35%, 30% or 25%, more preferably less than 20% or 15% in comparison to the control plant under non-stress conditions. Due to advances in agricultural practices (irrigation, fertilization, pesticide treatments) severe stresses are not often encountered in cultivated crop plants. As a consequence, the compromised growth induced by mild stress is often an undesirable feature for agriculture. “Mild stresses” are the everyday biotic and/or abiotic (environmental) stresses to which a plant is exposed. Abiotic stresses may be due to drought or excess water, anaerobic stress, salt stress, chemical toxicity, oxidative stress and hot, cold or freezing temperatures.

[0137] “Biotic stresses” are typically those stresses caused by pathogens, such as bacteria, viruses, fungi, nematodes and insects.

[0138] The “abiotic stress” may be an osmotic stress caused by a water stress, e.g. due to drought, salt stress, or freezing stress. Abiotic stress may also be an oxidative stress or a cold stress. “Freezing stress” is intended to refer to stress due to freezing temperatures, i.e. temperatures at which available water molecules freeze and turn into ice. “Cold stress”, also called “chilling stress”, is intended to refer to cold temperatures, e.g. temperatures below 10°, or preferably below 5° C., but at which water molecules do not freeze. As reported in Wang et al. (Planta (2003) 218: 1-14), abiotic stress leads to a series of morphological, physiological, biochemical and molecular changes that adversely affect plant growth and productivity. Drought, salinity, extreme temperatures and oxidative stress are known to be interconnected and may induce growth and cellular damage through similar mechanisms. Rabbani et al. (Plant Physiol (2003) 133: 1755-1767) describes a particularly high degree of “cross talk” between drought stress and high-salinity stress. For example, drought and/or salinisation are manifested primarily as osmotic stress, resulting in the disruption of homeostasis and ion distribution in the cell. Oxidative stress, which frequently accompanies high or low temperature, salinity or drought stress, may cause denaturing of functional and structural proteins. As a consequence, these diverse environmental stresses often activate similar cell signalling pathways and cellular responses, such as the production of stress proteins, up-regulation of anti-oxidants, accumulation of compatible solutes and growth arrest. The term “non-stress” conditions as used herein are those environmental conditions that allow optimal growth of plants. Persons skilled in the art are aware of normal soil conditions and climatic conditions for a given location. Plants with optimal growth conditions, (grown under non-stress conditions) typically yield in increasing order of preference at least 97%, 95%, 92%, 90%, 87%, 85%, 83%, 80%, 77% or 75% A of the average production of such plant in a given environment. Average production may be calculated on harvest and/or season basis. Persons skilled in the art are aware of average yield productions of a crop.

[0139] In particular, the methods of the present invention may be performed under non-stress conditions. In an example, the methods of the present invention may be performed under non-stress conditions such as mild drought to give plants having increased yield relative to control plants.

[0140] In another embodiment, the methods of the present invention may be performed under stress conditions.

[0141] In an example, the methods of the present invention may be performed under stress conditions such as drought to give plants having increased yield relative to control plants.

[0142] In another example, the methods of the present invention may be performed under stress conditions such as nutrient deficiency to give plants having increased yield relative to control plants.

[0143] Nutrient deficiency may result from a lack of nutrients such as nitrogen, phosphates and other phosphorous-containing compounds, potassium, calcium, magnesium, manganese, iron and boron, amongst others.

[0144] In yet another example, the methods of the present invention may be performed under stress conditions such as salt stress to give plants having increased yield relative to control plants. The term salt stress is not restricted to common salt (NaCl), but may be any one or more of: NaCl, KCl, LiCl, MgCl₂, CaCl₂, amongst others.

[0145] In yet another example, the methods of the present invention may be performed under stress conditions such as cold stress or freezing stress to give plants having increased yield relative to control plants.

### Increase/Improve/Enhance

[0146] The terms “increase”, “improve” or “enhance” are interchangeable and shall mean in the sense of the application at least a 3%, 4%, 5%, 6%, 7%, 8%, 9% or 10%, preferably at least 15% or 20%, more preferably 25%, 30%, 35% or 40% more yield and/or growth in comparison to control plants as defined herein.

### Seed Yield

[0147] Increased seed yield may manifest itself as one or more of the following:
[0148] (a) an increase in seed biomass (total seed weight) which may be on an individual seed basis and/or per plant and/or per square meter;
[0149] (b) increased number of flowers per plant;
[0150] (c) increased number of seeds;
[0151] (d) increased seed filling rate (which is expressed as the ratio between the number of filled florets divided by the total number of florets);
[0152] (e) increased harvest index, which is expressed as a ratio of the yield of harvestable parts, such as seeds, divided by the biomass of aboveground plant parts; and
[0153] (f) increased thousand kernel weight (TKW), which is extrapolated from the number of seeds counted and their total weight. An increased TKW may result from an increased seed size and/or seed weight, and may also result from an increase in embryo and/or endosperm size.

[0154] The terms “filled florets” and “filled seeds” may be considered synonyms.

[0155] An increase in seed yield may also be manifested as an increase in seed size and/or seed volume. Furthermore, an increase in seed yield may also manifest itself as an increase in seed area and/or seed length and/or seed width and/or seed perimeter.

### Greenness Index

[0156] The “greenness index” as used herein is calculated from digital images of plants. For each pixel belonging to the plant object on the image, the ratio of the green value versus the red value (in the RGB model for encoding color) is calculated. The greenness index is expressed as the percentage of pixels for which the green-to-red ratio exceeds a given threshold. Under normal growth conditions, under salt stress growth conditions, and under reduced nutrient availability growth conditions, the greenness index of plants is measured in the last imaging before flowering. In contrast, under drought stress growth conditions, the greenness index of plants is measured in the first imaging after drought.

### Biomass

[0157] The term “biomass” as used herein is intended to refer to the total weight of a plant. Within the definition of biomass, a distinction may be made between the biomass of one or more parts of a plant, which may include any one or more of the following:
[0158] aboveground parts such as but not limited to shoot biomass, seed biomass, leaf biomass, etc.;
[0159] aboveground harvestable parts such as but not limited to shoot biomass, seed biomass, leaf biomass, etc.:
[0160] parts below ground, such as but not limited to root biomass, etc.;
[0161] harvestable parts below ground, such as but not limited to root biomass, etc.;
[0162] vegetative biomass such as root biomass, shoot biomass, etc.;
[0163] reproductive organs; and
[0164] propagules such as seed.

### Marker Assisted Breeding

[0165] Such breeding programmes sometimes require introduction of allelic variation by mutagenic treatment of the plants, using for example EMS mutagenesis; alternatively, the programme may start with a collection of allelic variants of so called “natural” origin caused unintentionally. Identification of allelic variants then takes place, for example, by PCR. This is followed by a step for selection of superior allelic variants of the sequence in question and which give increased yield. Selection is typically carried out by monitoring growth performance of plants containing different allelic variants of the sequence in question. Growth performance may be monitored in a greenhouse or in the field. Further optional steps include crossing plants in which the superior allelic variant was identified with another plant. This could be used, for example, to make a combination of interesting phenotypic features.

### Use as Probes in (Gene Mapping)

[0166] Use of nucleic acids encoding the protein of interest for genetically and physically mapping the genes requires only a nucleic acid sequence of at least 15 nucleotides in length. These nucleic acids may be used as restriction fragment length polymorphism (RFLP) markers. Southern blots (Sambrook J, Fritsch E F and Maniatis T (1989) Molecular Cloning, A Laboratory Manual) of restriction-digested plant genomic DNA may be probed with the nucleic acids encoding the protein of interest. The resulting banding patterns may then be subjected to genetic analyses using computer programs such as MapMaker (Lander et al. (1987) Genomics 1: 174-181) in order to construct a genetic map. In addition, the nucleic acids may be used to probe Southern blots containing restriction endonuclease-treated genomic DNAs of a set of individuals representing parent and progeny of a defined genetic cross. Segregation of the DNA polymorphisms is noted and used to calculate the position of the nucleic acid encoding the protein of interest in the genetic map previously obtained using this population (Botstein et al. (1980) Am. J. Hum. Genet. 32:314-331).

[0167] The production and use of plant gene-derived probes for use in genetic mapping is described in Bernatzky and Tanksley (1986) Plant Mol. Biol. Reporter 4: 37-41. Numerous publications describe genetic mapping of specific cDNA clones using the methodology outlined above or variations thereof. For example, F2 intercross populations, backcross populations, randomly mated populations, near isogenic lines, and other sets of individuals may be used for mapping. Such methodologies are well known to those skilled in the art.

[0168] The nucleic acid probes may also be used for physical mapping (i.e., placement of sequences on physical maps; see Hoheisel et al. In: Non-mammalian Genomic Analysis: A Practical Guide, Academic press 1996, pp. 319-346, and references cited therein).

[0169] In another embodiment, the nucleic acid probes may be used in direct fluorescence in situ hybridisation (FISH) mapping (Trask (1991) Trends Genet. 7:149-154). Although current methods of FISH mapping favour use of large clones (several kb to several hundred kb; see Laan et al. (1995) Genome Res. 5:13-20), improvements in sensitivity may allow performance of FISH mapping using shorter probes.

[0170] A variety of nucleic acid amplification-based methods for genetic and physical mapping may be carried out using the nucleic acids. Examples include allele-specific amplification (Kazazian (1989) J. Lab. Clin. Med. 11:95-96), polymorphism of PCR-amplified fragments (CAPS; Sheffield et al. (1993) Genomics 16:325-332), allele-specific ligation (Landegren et al. (1988) Science 241:1077-1080), nucleotide extension reactions (Sokolov (1990) Nucleic Acid Res. 18:3671), Radiation Hybrid Mapping (Walter et al. (1997) Nat. Genet. 7:22-28) and Happy Mapping (Dear and Cook (1989) Nucleic Acid Res. 17:6795-6807). For these methods, the sequence of a nucleic acid is used to design and produce primer pairs for use in the amplification reaction or in primer extension reactions. The design of such primers is well known to those skilled in the art. In methods employing PCR-based genetic mapping, it may be necessary to identify DNA sequence differences between the parents of the mapping cross in the region corresponding to the instant nucleic acid sequence. This, however, is generally not necessary for mapping methods.

### Plant

[0171] The term “plant” as used herein encompasses whole plants, ancestors and progeny of the plants and plant parts, including seeds, shoots, stems, leaves, roots (including tubers), flowers, and tissues and organs, wherein each of the aforementioned comprise the gene/nucleic acid of interest. The term “plant” also encompasses plant cells, suspension cultures, callus tissue, embryos, meristematic regions, gametophytes, sporophytes, pollen and microspores, again wherein each of the aforementioned comprises the gene/nucleic acid of interest.

[0172] Plants that are particularly useful in the methods of the invention include all plants which belong to the superfamily Viridiplantae, in particular monocotyledonous and dicotyledonous plants including fodder or forage legumes, ornamental plants, food crops, trees or shrubs selected from the list comprising Acer spp., Actinidia spp., Abelmoschus spp., Agave sisalana, Agropyron spp., Agrostis stolonifera, Allium spp., Amaranthus spp., Ammophila arenaria, Ananas comosus, Annona spp., Apium graveolens, Arachis spp, Artocarpus spp., Asparagus officinalis, Avena spp. (e.g. Avena sativa, Avena fatua, Avena byzantina, Avena fatua var. sativa, Avena hybrida), Averrhoa carambola, Bambusa sp., Benincasa hispida, Bertholletia excelsea, Beta vulgaris, Brassica spp. (e.g. Brassica napus, Brassica rapa ssp. [canola, oilseed rape, turnip rape]), Cadaba farinosa, Camellia sinensis, Canna indica, Cannabis sativa, Capsicum spp., Carex elata, Carica papaya, Carissa macrocarpa, Carya spp., Carthamus tinctorius, Castanea spp., Ceiba pentandra, Cichorium endivia, Cinnamomum spp., Citrullus lanatus, Citrus spp., Cocos spp., Coffea spp., Colocasia esculenta, Cola spp., Corchorus sp., Coriandrum sativum, Corylus spp., Crataegus spp., Crocus sativus, Cucurbita spp., Cucumis spp., Cynara spp., Daucus carota, Desmodium spp., Dimocarpus longan, Dioscorea spp., Diospyros spp., Echinochloa spp., Elaeis (e.g. Elaeis guineensis, Elaeis oleifera), Eleusine coracana, Eragrostis tef, Erianthus sp., Eriobotrya japonica, Eucalyptus sp., Eugenia uniflora, Fagopyrum spp., Fagus spp., Festuca arundinacea, Ficus carica, Fortunella spp., Fragaria spp., Ginkgo biloba, Glycine spp. (e.g. Glycine max, Soja hispida or Soja max), Gossypium hirsutum, Helianthus spp. (e.g. Helianthus annuus), Hemerocallis fulva, Hibiscus spp., Hordeum spp. (e.g. Hordeum vulgare), Ipomoea batatas, Juglans spp., Lactuca sativa, Lathyrus spp., Lens culinaris, Linum usitatissimum, Litchi chinensis, Lotus spp., Luffa acutangula, Lupinus spp., Luzula sylvatica, Lycopersicon spp. (e.g. Lycopersicon esculentum, Lycopersicon lycopersicum, Lycopersicon pyriforme), Macrotyloma spp., Malus spp., Malpighia emarginata, Mammea americana, Mangifera indica, Manihot spp., Manilkara zapota, Medicago sativa, Melilotus spp., Mentha spp., Miscanthus sinensis, Momordica spp., Morus nigra, Musa spp., Nicotiana spp., Olea spp., Opuntia spp., Ornithopus spp., Oryza spp. (e.g. Oryza sativa, Oryza latifolia), Panicum miliaceum, Panicum virgatum, Passiflora edulis, Pastinaca sativa, Pennisetum sp., Persea spp., Petroselinum crispum, Phalaris arundinacea, Phaseolus spp., Phleum pratense, Phoenix spp., Phragmites australis, Physalis spp., Pinus spp., Pistacia vera, Pisum spp., Poa spp., Populus spp., Prosopis spp., Prunus spp., Psidium spp., Punica granatum, Pyrus communis, Quercus spp., Raphanus sativus, Rheum rhabarbarum, Ribes spp., Ricinus communis, Rubus spp., Saccharum spp., Salix sp., Sambucus spp., Secale cereale, Sesamum spp., Sinapis sp., Solanum spp. (e.g. Solanum tuberosum, Solanum integrifolium or Solanum lycopersicum), Sorghum bicolor, Spinacia spp., Syzygium spp., Tagetes spp., Tamarindus indica, Theobroma cacao, Trifolium spp., Tripsacum dactyloides, Triticosecale rimpaui, Triticum spp. (e.g. Triticum aestivum, Triticum durum, Triticum turgidum, Triticum hybernum, Triticum macha, Triticum sativum, Triticum monococcum or Triticum vulgare), Tropaeolum minus, Tropaeolum majus, Vaccinium spp., Vicia spp., Vigna spp., Viola odorata, Vitis spp., Zea mays, Zizania palustris, Ziziphus spp., amongst others.

### Control Plant(s)

[0173] The choice of suitable control plants is a routine part of an experimental setup and may include corresponding wild type plants or corresponding plants without the gene of interest. The control plant is typically of the same plant species or even of the same variety as the plant to be assessed. The control plant may also be a nullizygote of the plant to be assessed. Nullizygotes are individuals missing the transgene by segregation. A “control plant” as used herein refers not only to whole plants, but also to plant parts, including seeds and seed parts.

### DETAILED DESCRIPTION OF THE INVENTION

[0174] Surprisingly, it has now been found that modulating expression in a plant of a nucleic acid encoding a CLC-like polypeptide, or an OsBURP-like polypeptide, or an AP2/ERF polypeptide gives plants having enhanced yield-related traits relative to control plants. According to a first embodiment, the present invention provides a method for enhancing yield-related traits in plants relative to control plants, comprising modulating expression in a plant of a nucleic acid encoding a CLC-like polypeptide, or an OsBURP-like polypeptide, or an AP2/ERF polypeptide and optionally selecting for plants having enhanced yield-related traits.

[0175] Furthermore, concerning a TPS-TPP protein fusion, it now has surprisingly been found that modulating expression in a plant of (i) a nucleic acid encoding a TPS-TPP protein fusion: which is a fusion between a TPS polypeptide or an active portion thereof and a TPP polypeptide or an active portion thereof; or (ii) of a first nucleic acid encoding a TPS polypeptide or an active portion thereof, and a second nucleic acid encoding a TPP polypeptide or an active portion thereof, wherein the first and second nucleic acids are comprised in a single or in multiple, at least two, nucleic acid molecules gives plants having enhanced yield-related traits relative to control plants.

[0176] According to a first embodiment, the present invention provides a method for enhancing yield-related traits in plants relative to control plants, comprising modulating expression in a plant of (i) a nucleic acid encoding a TPS-TPP protein fusion: fusion between a TPS polypeptide or an active portion thereof and a TPP polypeptide or an active portion thereof; or (ii) of a first nucleic acid encoding a TPS polypeptide or an active portion thereof, and a second nucleic acid encoding a TPP polypeptide or an active portion thereof, wherein the first and second nucleic acids are comprised in a single or in multiple, at least two, nucleic acid molecules gives plants having enhanced yield-related traits relative to control plants and optionally selecting for plants having enhanced yield-related traits.

[0177] A preferred method for modulating, preferably increasing expression of a nucleic acid encoding a CLC-like polypeptide, or an OsBURP-like polypeptide, or an AP2/ERF polypeptide is by introducing and expressing in a plant a nucleic acid encoding a CLC-like polypeptide, or an OsBURP-like polypeptide, or an AP2/ERF polypeptide, respectively.

[0178] Concerning a TPS-TPP protein fusion, a preferred method for modulating, preferably, increasing expression of a nucleic acid encoding a TPS and a TPP polypeptide is by introducing and expressing in a plant a nucleic acid encoding a fusion between a TPS and a TPP polypeptide or active fragment of any thereof or by introducing and expressing separately the TPS and the TPP nucleic acids whether in a single or in multiple molecules.

[0179] In one embodiment, in particular concerning CLC-like polypeptides, any reference hereinafter to a “protein useful in the methods of the invention” is taken to mean a CLC-like polypeptide as defined herein. Any reference hereinafter to a “nucleic acid useful in the methods of the invention” is taken to mean a nucleic acid capable of encoding such a CLC-like polypeptide. The nucleic acid to be introduced into a plant (and therefore useful in performing the methods of the invention) is any nucleic acid encoding the type of protein which will now be described, hereafter also named “CLC-like nucleic acid” or “CLC-like gene”.

[0180] A “CLC-like polypeptide” as defined herein refers to any polypeptide comprising a Voltage CLC domain (Pfam entry PF00654) and C-terminally thereof a CBS domain (Pfam entry PF00571). CLC-like polypeptides are part of a family of voltage-gated channels that is highly conserved over various kingdoms of life and are structurally unrelated to the other known voltage-gated channels. They are found in organisms ranging from bacteria to yeasts and plants, and also in animals. CLC-like polypeptides typically have 10 or 12 transmembrane (TM) domains, occasionally less than 10 TM domains. The CLC-like polypeptide represented by SEQ ID NO: 2 for example is predicted to have eight TM domains. CBS (cystathionine-beta-synthase) domains are small intracellular modules, mostly found in two or four copies within a protein (two copies for CLC-like proteins), and are present in several different proteins in all kingdoms of life. Tandem pairs of CBS domains can act as binding domains for adenosine derivatives and may regulate the activity of attached enzymatic or other domains.

[0181] Preferably, the CLC-like polypeptide useful in the methods of the present invention comprises one or more of the motifs 1 to 8:

Motif 1
(SEQ ID NO: 83)
(S/C/A/G/P)(H/Y/P/G)(I/V/M)(E/Q/N)SLDYE(I/V/L)(N/A/F/I/V)(E/D).
Preferably, motif 1 is:
(SEQ ID NO: 492)
(S/C/A/G/P)(H/Y/P/G)(I/V/M)(E/N)SLDYE(I/V/L)(N/A/F/I/V)E.
More preferably, motif 1 is:
(SEQ ID NO: 493)
(S/A/G/P)(H/Y/P/G)(I/V/M)(E/N)SLDYE(I/V/L)(N/I/V)E
Motif 2
(SEQ ID NO: 84)
P(T/A/S)A(A/G/T)G(P/S)GI(P/S)E(V/I)K(A/G)YLNG(I/V)D.
Preferably, motif 2 is:
(SEQ ID NO: 494)
P(T/A/S)AAG(P/S)GIPE(V/I)K(A/G)YLNG(I/V)D
Motif 3
(SEQ ID NO: 85)
G(S/C/N)I(G/C/F/L/A/S/T)(A/S/G)V(A/S/G)(A/S/G)(G/S)(L/F)(D/A/L/V/I/H/F)
(L/V/I)GK(E/A)GP(L/M).
Preferably, motif 3 is:
(SEQ ID NO: 495)
G(S/C/N) I(G/C/F/A/S/T) (A/S/G)V(A/S/G)(A/S/G)(G/S)
(L/F)(D/A/L/V/I/H/F)(L/V/I)GK(E/A)GP(L/M).
More preferably, motif 3 is:
(SEQ ID NO: 496)
GSI(G/C)(A/S)V(A/S/G)(A/S/G)GL(D/A/I)(L/V)GKEGPL.
Motif 4
(SEQ ID NO: 86)
PVGGVLFALE(E/A/S/G)(V/A/L/M)(A/T/S)(T/S)W(W/S)(R/A).
Preferably, motif 4 is:
(SEQ ID NO: 497)
PVGGVLFALEEV(A/T)(T/S)WWR.
Motif 5
(SEQ ID NO: 87)
(G/D)(K/R/N/HI)CG(L/M/H)(F/A)G(S/K/E/Q)GG(L/F)I(M/L/I)(F/Y/W)D.
Preferably, motif 5 is:
(SEQ ID NO: 498)
G(K/R/N/H/I) CG(L/M/H)(F/A)G (S/K/E/G)GG(L/F)I(M/L/I) (F/Y/W) D.
Motif 6
(SEQ ID NO: 88)
YN(D/N/G/A)(L/M)(S/A).
Preferably, motif 6 is:
(SEQ ID NO: 499)
YN(D/G/A)(L/M)(S/A).
More preferably, motif 6 is:
(SEQ ID NO: 500)
YNDL(S/A).
Motif 7
(SEQ ID NO: 89)
G(S/T)(M/L)R(M/T)TVS(L/V/T).
Preferably, motif 7 is:
(SEQ ID NO: 501)
GSMRMTVSL.
Motif 8
(SEQ ID NO: 90)
M(F/I/L/V/M)VL(L/F/V)(I/V)(A/S)K(T/A/S)(V/I)(G/A)(D/N)(S/AF/I/C/N/G/V)FN.
Preferably, motif 8 is:
(SEQ ID NO: 502)
M (F/I/L/V/M) VL(L/F/V) (I/V)(A/S) K(T/A/S)V (G/A)
(D/N)(S/A/F/C/G/V)FN.
More preferably, motif 8 is:
(SEQ ID NO: 503)
M(F/I/L)VLLI(A/S)K(T/A)VGD(S/A/F)FN.

[0182] Further preferably, the CLC-like polypeptide comprises in increasing order of preference, at least 2, at least 3, at least 4, at least 5, at least 6, at least 7, or all 8 motifs.

[0183] Additionally or alternatively, the homologue of a CLC-like protein has in increasing order of preference at least 25%, 26%, 27%, 28%, 29%, 30%, 31%, 32%, 33%, 34%, 35%, 36%, 37%, 38%, 39%, 40%, 41%, 42%, 43%, 44%, 45%, 46%, 47%, 48%, 49%, 50%, 51%, 52%, 53%, 54%, 55%, 56%, 57%, 58%, 59%, 60%, 61%, 62%, 63%, 64%, 65%, 66%, 67%, 68%, 69%, 70%, 71%, 72%, 73%, 74%, 75%, 76%, 77%, 78%, 79%, 80%, 81%, 82%, 83%, 84%, 85%, 86%, 87%, 88%, 89%, 90%, 91%, 92%, 93%, 94%, 95%, 96%, 97%, 98%, or 99% overall sequence identity to the amino acid represented by SEQ ID NO: 2, provided that the homologous protein comprises any one or more of the conserved motifs as outlined above. The overall sequence identity is determined using a global alignment algorithm, such as the Needleman Wunsch algorithm in the program GAP (GCG Wisconsin Package, Accelrys), preferably with default parameters and preferably with sequences of mature proteins (i.e. without taking into account secretion signals or transit peptides). Compared to overall sequence identity, the sequence identity will generally be higher when only conserved domains or motifs are considered. Preferably the motifs in a CLC-like polypeptide have, in increasing order of preference, at least 70%, 71%, 72%, 73%, 74%, 75%, 76%, 77%, 78%, 79%, 80%, 81%, 82%, 83%, 84%, 85%, 86%, 87%, 88%, 89%, 90%, 91%, 92%, 93%, 94%, 95%, 96%, 97%, 98%, or 99% sequence identity to any one or more of the motifs represented by SEQ ID NO: 83 to SEQ ID NO: 90 and SEQ ID NO: 492 to 503 (Motifs 1 to 8).

[0184] In another embodiment, in particular concerning OsBURP-like polypeptides, any reference hereinafter to a “protein useful in the methods of the invention” is taken to mean an OsBURP-like polypeptide as defined herein. Any reference hereinafter to a “nucleic acid useful in the methods of the invention” is taken to mean a nucleic acid capable of encoding such an OsBURP-like polypeptide. The nucleic acid to be introduced into a plant (and therefore useful in performing the methods of the invention) is any nucleic acid encoding the type of protein which will now be described, hereafter also named “OsBURP-like nucleic acid” or “OsBURP-like gene”.

[0185] An “OsBURP-like polypeptide” as defined herein refers to any BURP domain-containing protein comprising a BURP domain (Pfam accession PF03181) and further comprising motifs 9, 10 and 11, or a motif having not more than 2 mismatches to motifs 9 to 11.

Motif 9 (SEQ ID NO: 140):
[HE][EK][HK]YCATSLESM[VI][DE][LF][SVA][TA]S[KS]LG
Motif 10 (SEQ ID NO: 141):
V[VA]CH[RK][QEM][NP]Y[AP]YAVF[YG][VC]H[KGT][TIS][KE][AGT][AT]
Motif 11 (SEQ ID NO: 142):
[AP][VK][AH][EL]A[YF][QK][RV]L[KG]V[AK]PG[TKS]V[PA]VCHFLPQD[DH][VMI][VL]W

[0186] Additionally or alternatively, the OsBURP-like polypeptide comprises one or more of the motifs 12 to 24.

Motif 12 (SEQ ID NO: 143):
[FL]LPR[GQ][VR]ADS[IV]PF[SA]S[EDN]KLPEI[LF][NS][KQR][FL]S[VI][PK][PA]G
Motif 13 (SEQ ID NO: 144):
[SL][PST][AP]E[MQ]YW[KS][IS][AK]LP[NT][TS]P[MI]P[KG][AS][IV][KR]D[LI][IL][SH]P[DA]
[SL]S[AE][AE][KS]
Motif 14 (SEQ ID NO: 145):
[AE][ST][KQ][LDI][KH][DE]D[TP][NVT][GV][SA][VL]FFLE[KE]D[LM][HFR]PG[KSA][KT]M
[NT]LHF
Motif 15 (SEQ ID NO: 146):
DGT[RMK][AV][KE]A[VL]A[AV]CH[TGA]D[TV]
Motif 16 (SEQ ID NO: 147):
S[PV][ETK]A[DE][AM][MV][RK][SN][LT][IL][AK][VE]CE
Motif 17 (SEQ ID NO: 148):
[KG][PQ][TS]P[MR]Q[AK]Y[RT][IV][AET]A[GVA][RV][KPR]
Motif 18 (SEQ ID NO: 149):
AY[MT]V[TP]L[EA]G
Motif 19 (SEQ ID NO: 150):
[KG][HE][KA][HK][AY]CATSLESMV[ED][LF][AV][AT]SSLGT[RS][DH][VI][RH]A[VA]ST[EV]V
Motif 20 (SEQ ID NO: 151)
[HA][EV]A[FY][KQ][VR]L[GK]V[KA]PG[TKS]V[AP]VCHF[LM]PQD[HD][VM][VL]W[VT][RS]
Motif 21 (SEQ ID NO: 152)
[AK][FL]LPRG[RE]A[DE][SA][VI]PF[AS]SEKL[PS]EILS[QR][FL][SG][VI]P[AP]
Motif 22 (SEQ ID NO: 153)
[KH]YCATSLES[ML]VE[FL][AV]ASSLGTRD[VI][HR]AVSTE
Motif 23 (SEQ ID NO: 154)
[VA]RPV[PS]V[SP]GGDMV[AT]CH[GRD]M[AP]Y[AP]YAV[FY]G[VC]H[TG][IT]
Motif 24 (SEQ ID NO: 155)
KEDT[VT]G[SN]VFFLEKDL[FR]PGSK[MIL]TLHF[TP][RP]AT

[0187] Motifs 9 to 24 were derived using the MEME algorithm (Bailey and Elkan, Proceedings of the Second International Conference on Intelligent Systems for Molecular Biology, pp. 28-36, AAAI Press, Menlo Park, Calif., 1994). At each position within a MEME motif, the residues are shown that are present with a frequency higher than 0.2. Residues within square brackets represent alternatives.

[0188] Preferably, the “OsBURP-like polypeptide” comprises (i) an N-terminal hydrophobic domain—a presumptive transit peptide, joined to (ii) a short conserved segment or other short segment, (iii) optionally, a segment consisting of repeated units, and (iv) the C-terminal BURP domain (Hattori et al., 1998).

[0189] More preferably, the OsBURP-like polypeptide comprises in increasing order of preference, at least 2, at least 3, at least 4, at least 5, at least 6, at least 7, at least 8, at least 9, at least 10, at least 11, at least 12, at least 13, at least 14, at least 15, or all 16 motifs.

[0190] Additionally or alternatively, the homologue of an OsBURP-like protein has in increasing order of preference at least 25%, 26%, 27%, 28%, 29%, 30%, 31%, 32%, 33%, 34%, 35%, 36%, 37%, 38%, 39%, 40%, 41%, 42%, 43%, 44%, 45%, 46%, 47%, 48%, 49%, 50%, 51%, 52%, 53%, 54%, 55%, 56%, 57%, 58%, 59%, 60%, 61%, 62%, 63%, 64%, 65%, 66%, 67%, 68%, 69%, 70%, 71%, 72%, 73%, 74%, 75%, 76%, 77%, 78%, 79%, 80%, 81%, 82%, 83%, 84%, 85%, 86%, 87%, 88%, 89%, 90%, 91%, 92%, 93%, 94%, 95%, 96%, 97%, 98%, or 99% overall sequence identity to the amino acid represented by SEQ ID NO: 95, provided that the homologous protein comprises any one or more of the conserved motifs as outlined above. The overall sequence identity is determined using a global alignment algorithm, such as the Needleman Wunsch algorithm in the program GAP (GCG Wisconsin Package, Accelrys), preferably with default parameters and preferably with sequences of mature proteins (i.e. without taking into account secretion signals or transit peptides). Compared to overall sequence identity, the sequence identity will generally be higher when only conserved domains or motifs are considered. Preferably the motifs in an OsBURP-like polypeptide have, in increasing order of preference, at least 70%, 71%, 72%, 73%, 74%, 75%, 76%, 77%, 78%, 79%, 80%, 81%, 82%, 83%, 84%, 85%, 86%, 87%, 88%, 89%, 90%, 91%, 92%, 93%, 94%, 95%, 96%, 97%, 98%, or 99% sequence identity to any one or more of the motifs represented by SEQ ID NO: 140 to SEQ ID NO: 155 (Motifs 9 to 24).

[0191] In yet another embodiment, in particular with regard to AP2/ERF-like polypeptides, any reference hereinafter to a “protein useful in the methods of the invention” is taken to mean an AP2/ERF polypeptide as defined herein. Any reference hereinafter to a “nucleic acid useful in the methods of the invention” is taken to mean a nucleic acid capable of encoding such an AP2/ERF polypeptide. The nucleic acid to be introduced into a plant (and therefore useful in performing the methods of the invention) is any nucleic acid encoding the type of protein which will now be described, hereafter also named “AP2/ERF nucleic acid” or “AP2/ERF gene”.

[0192] An “AP2/ERF polypeptide” as defined herein refers to any polypeptide comprising at least one “APETALA2/ethylene-responsive element-binding factor”, i.e. an AP2/ERF domain, with a PFam accession number PF00847, which consists of about 60 to 70 amino acids and is involved in DNA binding activity.

[0193] Preferably, the AP2/ERF domain of an AP2/ERF polypeptide has at least, in increasing order of preference, 49%, 50%, 51%, 52%, 53%, 54%, 55%, 56%, 57%, 58%, 59%, 60%, 61%, 62%, 63%, 64%, 65%, 66%, 67%, 68%, 69%, 70%, 71%, 72%, 73%, 74%, 75%, 76%, 77%, 78%, 79%, 80%, 81%, 82%, 83%, 84%, 85%, 86%, 87%, 88%, 89%, 90%, 91%, 92%, 93%, 94%, 95%, 96%, 97%, 98%, or 99% or more sequence identity to the SEQ ID NO 160.

[0194] Additionally or alternatively, the AP2/ERF polypeptide useful in the methods of the invention comprises one or more sequence motifs having at least, in increasing order of preference 49%, 50%, 51%, 52%, 53%, 54%, 55%, 56%, 57%, 58%, 59%, 60%, 61%, 62%, 63%, 64%, 65%, 66%, 67%, 68%, 69%, 70%, 71%, 72%, 73%, 74%, 75%, 76%, 77%, 78%, 79%, 80%, 81%, 82%, 83%, 84%, 85%, 86%, 87%, 88%, 89%, 90%, 91%, 92%, 93%, 94%, 95%, 96%, 97%, 98%, or 99% or more sequence identity to the Motif 25:

[0195] The “X” in the sequence indicates no conservation at this position.

Motif 25:
(SEQ ID NO: 265)
GXRXRXWGXWVXEIRXPXXXXRXWLGSXXXXXXAAXAXDXA

[0196] Motif 25 is typically found in any AP2/ERF polypeptide of any origin.

[0197] In another preferred embodiment of the present invention the AP2/ERF polypeptide of the invention may comprises Motif 25 and at least one of the Motifs 26, 27 and 28 as defined above, or may comprise a motif having, in increasing order of preference at least 49%, 50%, 51%, 52%, 53%, 54%, 55%, 56%, 57%, 58%, 59%, 60%, 61%, 62%, 63%, 64%, 65%, 66%, 67%, 68%, 69%, 70%, 71%, 72%, 73%, 74%, 75%, 76%, 77%, 78%, 79%, 80%, 81%, 82%, 83%, 84%, 85%, 86%, 87%, 88%, 89%, 90%, 91%, 92%, 93%, 94%, 95%, 96%, 97%, 98%, or 99% or more sequence identity to any one or more of Motifs 26 to 28:

Motif 26:
(SEQ ID NO: 266)
IXXXA
Motif 27:
(SEQ ID NO: 267)
DXNXXP
Motif 28:
(SEQ ID NO: 268)
LWXF

[0198] In another preferred embodiment of the present invention the AP2/ERF polypeptide of the invention may comprises Motif 25 and Motif 26 and Motif 27 or Motif 28 as defined above, or may comprise a motif having, in increasing order of preference at least 49%, 50%, 51%, 52%, 53%, 54%, 55%, 56%, 57%, 58%, 59%, 60%, 61%, 62%, 63%, 64%, 65%, 66%, 67%, 68%, 69%, 70%, 71%, 72%, 73%, 74%, 75%, 76%, 77%, 78%, 79%, 80%, 81%, 82%, 83%, 84%, 85%, 86%, 87%, 88%, 89%, 90%, 91%, 92%, 93%, 94%, 95%, 96%, 97%, 98%, or 99% or more sequence identity to any one or more of Motifs 26 to 28.

[0199] Motifs 26, 27 and 28 correspond to a consensus sequences which represent conserved protein regions in an AP2/ERF polypeptide of classes IIa, IIb and IIc origin, to which Medicago truncatula and Arabidopsis thaliana belong.

[0200] In another preferred embodiment of the present invention the AP2/ERF polypeptide of the invention may comprise Motif 26 and Motif 27 as defined above.

[0201] In another preferred embodiment of the present invention the AP2/ERF polypeptide of the invention may comprise Motif 25, Motif 26 and Motif 27 or Motif 28 as defined above.

[0202] In one most preferred embodiment of the present invention the AP2/ERF polypeptide of the invention may comprise Motif 25, Motif 26 and Motif 28 as defined above.

[0203] The most preferred embodiment of the present invention the AP2/ERF polypeptide of the invention may comprise Motif 25, Motif 26 and Motif 27 as defined above.

[0204] MEME algorithm (Bailey and Elkan, Proceedings of the Second International Conference on Intelligent Systems for Molecular Biology, pp. 28-36, AAAI Press, Menlo Park, Calif., 1994) was used for motif determination.

[0205] Additionally or alternatively, the homologue of a AP2/ERF protein has in increasing order of preference at least 25%, 26%, 27%, 28%, 29%, 30%, 31%, 32%, 33%, 34%, 35%, 36%, 37%, 38%, 39%, 40%, 41%, 42%, 43%, 44%, 45%, 46%, 47%, 48%, 49%, 50%, 51%, 52%, 53%, 54%, 55%, 56%, 57%, 58%, 59%, 60%, 61%, 62%, 63%, 64%, 65%, 66%, 67%, 68%, 69%, 70%, 71%, 72%, 73%, 74%, 75%, 76%, 77%, 78%, 79%, 80%, 81%, 82%, 83%, 84%, 85%, 86%, 87%, 88%, 89%, 90%, 91%, 92%, 93%, 94%, 95%, 96%, 97%, 98%, or 99% overall sequence identity to the amino acid represented by SEQ ID NO: 160, provided that the homologous protein comprises any one or more of the conserved motifs as outlined above. The overall sequence identity is determined using a global alignment algorithm, such as the Needleman Wunsch algorithm in the program GAP (GCG Wisconsin Package, Accelrys), preferably with default parameters and preferably with sequences of mature proteins (i.e. without taking into account secretion signals or transit peptides). Compared to overall sequence identity, the sequence identity will generally be higher when only conserved domains or motifs are considered. Preferably the motifs in a AP2/ERF polypeptide have, in increasing order of preference, at least 70%, 71%, 72%, 73%, 74%, 75%, 76%, 77%, 78%, 79%, 80%, 81%, 82%, 83%, 84%, 85%, 86%, 87%, 88%, 89%, 90%, 91%, 92%, 93%, 94%, 95%, 96%, 97%, 98%, or 99% sequence identity to any one or more of the motifs represented by SEQ ID NO: 265 to SEQ ID NO: 268 (Motifs 25 to 28).

[0206] In one embodiment, in particular concerning a TPS-TPP proteins fusion, any reference hereinafter to a “protein useful in the methods of the invention” is taken to mean a TPS and/or a TPP polypeptide and or a TPS-TPP fusion between the same as defined herein. Any reference hereinafter to a “nucleic acid useful in the methods of the invention” is taken to mean a nucleic acid capable of encoding such a TPS, TPP or TPS-TPP polypeptide. The nucleic acid to be introduced into a plant (and therefore useful in performing the methods of the invention) is any nucleic acid encoding the type of protein which will now be described, hereafter also named TPS, TPP or TPS-TPP nucleic acid, or TPS, TPP or TPS-TPP gene.

### Concerning TPS

[0207] A “TPS polypeptide” as defined herein refers to any polypeptide having trehalose-6-phosphate synthase activity. Methods to determine trehalose-6-phosphate synthase activity are well known in the art. Further details are provided in the Examples section.

[0208] Additionally or alternatively a TPS polypeptide useful in the methods of the invention comprises a Glycosyl transferase domains (Pfam accession number: PF0098).

[0209] A preferred Glycosyl transferase domain comprised in a TPS polypeptide useful in the methods of the invention has in increasing order of preference at least 50%, 51%, 52%, 53%, 54%, 55%, 56%, 57%, 58%, 59%, 60%, 61%, 62%, 63%, 64%, 65%, 66%, 67%, 68%, 69%, 70%, 71%, 72%, 73%, 74%, 75%, 76%, 77%, 78%, 79%, 80%, 81%, 82%, 83%, 84%, 85%, 86%, 87%, 88%, 89%, 90%, 91%, 92%, 93%, 94%, 95%, 96%, 97%, 98%, 99% or 100% sequence identity to any one or more of the Glycosyl transferase domains as present in any of the polypeptides of Tables A4 to A6, more preferably as present in SEQ ID NO: 273 or SEQ ID NO: 441 (see Example section).

[0210] A further preferred TPS polypeptide useful for the methods of the invention comprises a conserved motif having in increasing order of preference at least 50%, 51%, 52%, 53%, 54%, 55%, 56%, 57%, 58%, 59%, 60%, 61%, 62%, 63%, 64%, 65%, 66%, 67%, 68%, 69%, 70%, 71%, 72%, 73%, 74%, 75%, 76%, 77%, 78%, 79%, 80%, 81%, 82%, 83%, 84%, 85%, 86%, 87%, 88%, 89%, 90%, 91%, 92%, 93%, 94%, 95%, 96%, 97%, 98%, 99% or 100% sequence identity to any one or more of motifs:

(i)
TPS-Motif 29:
(SEQ ID NO: 458)
Y[EQ]EGDV[VI]WCHDYHLMFLP[KQ][CY]LK[ED][YH][ND][SIN][KN]MKVGWFLH
TPFPSSEI[YH][RK]TLPSR;
(ii)
(ii)TPS-Motif 30:
(SEQ ID NO: 459)
F[EK]YFTERTPRSHFE[TH][RS]ETS[LF]VWNY[KE]YADVEFGR[LA]QARD[ML]L
QHLW[TA]GPISN;
(iii)
(iii)TPS Motif 31:
(SEQ ID NO: 460)
GVDRLDMIKGIPQK[IY]LAFEKFLEEN[PA][EN]WRDKVVL[LV]QIAVPTR[TN]DVP
EYQK.

[0211] The Motifs abovementioned were identified using the polypeptides of Table A4 to A6 and the MEME algorithm (Bailey and Elkan, Proceedings of the Second International Conference on Intelligent Systems for Molecular Biology, pp. 28-36, AAAI Press, Menlo Park, Calif., 1994.)

[0212] More preferably, the TPS polypeptide comprises in increasing order of preference, at least 2, preferably 3 of the motifs above referenced.

[0213] Also useful in the methods of the invention are TPS homologues proteins to the E. coli TPS protein encoded by the OtsA gene.

[0214] Additionally or alternatively, the homologue of a TPS protein useful in the methods of the invention has in increasing order of preference at least 25%, 26%, 27%, 28%, 29%, 30%, 31%, 32%, 33%, 34%, 35%, 36%, 37%, 38%, 39%, 40%, 41%, 42%, 43%, 44%, 45%, 46%, 47%, 48%, 49%, 50%, 51%, 52%, 53%, 54%, 55%, 56%, 57%, 58%, 59%, 60%, 61%, 62%, 63%, 64%, 65%, 66%, 67%, 68%, 69%, 70%, 71%, 72%, 73%, 74%, 75%, 76%, 77%, 78%, 79%, 80%, 81%, 82%, 83%, 84%, 85%, 86%, 87%, 88%, 89%, 90%, 91%, 92%, 93%, 94%, 95%, 96%, 97%, 98%, or 99% overall sequence identity to the amino acid represented by any of the polypeptides of Table A4, preferably to SEQ ID NO: 273. The overall sequence identity is determined using a global alignment algorithm, such as the Needleman Wunsch algorithm in the program GAP (GCG Wisconsin Package, Accelrys), preferably with default parameters and preferably with sequences of mature proteins (i.e. without taking into account secretion signals or transit peptides). Compared to overall sequence identity, the sequence identity will generally be higher when only conserved domains or motifs are considered

### Concerning TPP

[0215] A “TPP polypeptide” as defined herein refers to any polypeptide having trehalose-6-phosphate phosphatase activity.

[0216] Methods to determine trehalose-6-phosphate phosphatase activity are well known in the art. Further details are provided in the Examples section.

[0217] Additionally or alternatively a TPP polypeptide useful in the methods of the invention comprises a Trehalose phosphatase (Trehalose_PPase) domain (Pfam accession number: PF02358).

[0218] A preferred Trehalose_PPase domain as present in a TPS polypeptide useful in the methods of the invention has in increasing order of preference at least 50%, 51%, 52%, 53%, 54%, 55%, 56%, 57%, 58%, 59%, 60%, 61%, 62%, 63%, 64%, 65%, 66%, 67%, 68%, 69%, 70%, 71%, 72%, 73%, 74%, 75%, 76%, 77%, 78%, 79%, 80%, 81%, 82%, 83%, 84%, 85%, 86%, 87%, 88%, 89%, 90%, 91%, 92%, 93%, 94%, 95%, 96%, 97%, 98%, 99% or 100% sequence identity to any one or more of the Trehalose_PPase domains as present in any of the polypeptides of Tables A4 to A6, more preferably as present in SEQ ID NO: 441 or SEQ ID NO: 443 (see Example section).

[0219] A further preferred polypeptide useful for the methods of the invention comprises a conserved motif having in increasing order of preference at least 50%, 51%, 52%, 53%, 54%, 55%, 56%, 57%, 58%, 59%, 60%, 61%, 62%, 63%, 64%, 65%, 66%, 67%, 68%, 69%, 70%, 71%, 72%, 73%, 74%, 75%, 76%, 77%, 78%, 79%, 80%, 81%, 82%, 83%, 84%, 85%, 86%, 87%, 88%, 89%, 90%, 91%, 92%, 93%, 94%, 95%, 96%, 97%, 98%, 99% or 100% sequence identity to any one or more of motifs:

(i)
TPP-Motif 32:
(SEQ ID NO: 461)
G[FW]FLH[ST]PFPSSEIYRTLP[VS]R[DES]E[LI]L[RK][AS][LV]LN[AC]DL[IV]GFH
T[FY]DYARHF[LV]S[CA]C[ST]R;
(ii)
TPP-Motif 33:
(SEQ ID NO: 462)
[FY][KA]G[KR][KT][VL][MLI]LGVD[DR][ML]D[IM][FI]KGI[SP][LQ]K[LI]LA[FM]E[QK]
[LF]LE[QE][HN]P[EK][WL][RQ][GD][KR][VA]VL[VL]QIA[NV]P[AT]R;
(iii)
TPP Motif 34:
(SEQ ID NO: 463)
A[YL]Y[AT][IV][AT][ED][CV][CV][LV]V[TN][AS][VL]RDGMNL[VI][PS]YE[YF][IVT]
[VA]C[RQ].

[0220] The motifs TPP Motif 32 to TPP Motif 34 are conserved in TPS and TPP polypeptides.

[0221] Even more preferably the TPP polypeptide useful in the methods of the invention comprises a motif having in increasing order of preference at least 50%, 51%, 52%, 53%, 54%, 55%, 56%, 57%, 58%, 59%, 60%, 61%, 62%, 63%, 64%, 65%, 66%, 67%, 68%, 69%, 70%, 71%, 72%, 73%, 74%, 75%, 76%, 77%, 78%, 79%, 80%, 81%, 82%, 83%, 84%, 85%, 86%, 87%, 88%, 89%, 90%, 91%, 92%, 93%, 94%, 95%, 96%, 97%, 98%, 99% or 100% sequence identity to any one or more of motifs:

(i)
TPP-Motif 35:
(SEQ ID NO: 464)
GKQIVMFLDYDGTLSPIV[DE]DPDRA[FV]M[ST][DE][EK]MR[ER][AT]V[RK][KG]
[VL]A[KR][HC]FPTAIV[ST]GRC;
(ii)
TPP-Motif 36:
(SEQ ID NO: 465)
QGRKV[LF]E[IV]RP[TS]IKWDKGKALEFLLESLG[FY][AE]N[CS];
(iii)
TPP-Motif 37:
(SEQ ID NO: 466)
P[IV]YIGDDRTDEDAFKVLRNRGQG[FI]GILVS;
(iv)
TPP-Motif 38:
(SEQ ID NO: 467)
F[CA][LV][ST][VW]H[YF]R;
(v)
TPP-Motif 39:
(SEQ ID NO: 468)
LDYDG;
(vi)
TPP-Motif 40:
(SEQ ID NO: 469)
GDDRTD.

[0222] Motifs TPP-Motif 37 to TPP-Motif 40 are conserved motifs in class III TPP polypeptides. “A.thaliana_AT1G78090.1#1_Class-III-B” polypeptide of Table A6 is an example of a Class III TPP polypeptide.

[0223] Motifs TPP-Motif 39 and TPP-Motif 40 represent a general phosphate box and a phosphatase box-like respectively present in TPP polypeptides which are typically required for phosphatase activity.

[0224] Motifs above were identified using the polypeptides of Table A4-A6 and the MEME algorithm (Bailey and Elkan, Proceedings of the Second International Conference on Intelligent Systems for Molecular Biology, pp. 28-36, AAAI Press, Menlo Park, Calif., 1994.)

[0225] More preferably, the TPP polypeptide comprises in increasing order of preference, at least 2, 3, 4 of the motifs above, more preferably motifs TPP-Motif 39 (SEQ ID NO: 468) and TPP-Motif 40 (SEQ ID NO: 469).

[0226] Also useful in the methods of the invention are TPP homologues proteins to the E. coli TPP protein encoded by the OtsB gene.

[0227] Additionally or alternatively, the homologue of a TPP polypeptide useful in the methods of the invention has in increasing order of preference at least 25%, 26%, 27%, 28%, 29%, 30%, 31%, 32%, 33%, 34%, 35%, 36%, 37%, 38%, 39%, 40%, 41%, 42%, 43%, 44%, 45%, 46%, 47%, 48%, 49%, 50%, 51%, 52%, 53%, 54%, 55%, 56%, 57%, 58%, 59%, 60%, 61%, 62%, 63%, 64%, 65%, 66%, 67%, 68%, 69%, 70%, 71%, 72%, 73%, 74%, 75%, 76%, 77%, 78%, 79%, 80%, 81%, 82%, 83%, 84%, 85%, 86%, 87%, 88%, 89%, 90%, 91%, 92%, 93%, 94%, 95%, 96%, 97%, 98%, or 99% overall sequence identity to the amino acid represented by any of the polypeptides of Table A5 more preferably to SEQ ID NO:299, SEQ ID NO: 301 or SEQ ID NO:357. The overall sequence identity is determined using a global alignment algorithm, such as the Needleman Wunsch algorithm in the program GAP (GCG Wisconsin Package, Accelrys), preferably with default parameters and preferably with sequences of mature proteins (i.e. without taking into account secretion signals or transit peptides). Compared to overall sequence identity, the sequence identity will generally be higher when only conserved domains or motifs are considered

### Concerning TPS-TPP Polypeptides

[0228] The term “TPS-TPP polypeptide” as used herein refers to a protein fusion between a TPS and TPP polypeptide or active portions of any thereof. The terms “TPS-TPP nucleic acid” or “TPS-TPP gene” refer to a polynucleotide encoding a TPS-TPP polypeptide.

[0229] A “TPS-TPP polypeptide” as defined herein refers to any polypeptide having both activities, trehalose-6-phosphate synthase activity and trehalose-6-phosphate phosphatase activity.

[0230] Methods to determine both enzyme activities are well known in the art. Further details on such methods are detailed in the Examples section.

[0231] Additionally or alternatively a TPS-TPP polypeptide useful in the methods of the invention comprises a Glycosyl transferase domains (Pfam accession number: PF0098) and a Trehalose phosphatase (Trehalose_PPase) domain (Pfam accession number: PF02358).

[0232] The TPS and the TPP portion within the TPS-TPP fusion are as TPS and TPP polypeptides defined above. Active fragments of TPS and TPP polypeptides are useful in the methods of the invention when used in a protein fusion that has both TPS and TPP activity.

[0233] Additionally or alternatively, the homologue of a TPS-TPP polypeptide useful in the methods of the invention has in increasing order of preference at least 25%, 26%, 27%, 28%, 29%, 30%, 31%, 32%, 33%, 34%, 35%, 36%, 37%, 38%, 39%, 40%, 41%, 42%, 43%, 44%, 45%, 46%, 47%, 48%, 49%, 50%, 51%, 52%, 53%, 54%, 55%, 56%, 57%, 58%, 59%, 60%, 61%, 62%, 63%, 64%, 65%, 66%, 67%, 68%, 69%, 70%, 71%, 72%, 73%, 74%, 75%, 76%, 77%, 78%, 79%, 80%, 81%, 82%, 83%, 84%, 85%, 86%, 87%, 88%, 89%, 90%, 91%, 92%, 93%, 94%, 95%, 96%, 97%, 98%, or 99% overall sequence identity to the amino acid represented by any of the polypeptides of Table A6 more preferably to SEQ ID NO: 441, SEQ ID NO: 443 or SEQ ID NO: 445. The overall sequence identity is determined using a global alignment algorithm, such as the Needleman Wunsch algorithm in the program GAP (GCG Wisconsin Package, Accelrys), preferably with default parameters and preferably with sequences of mature proteins (i.e. without taking into account secretion signals or transit peptides). Compared to overall sequence identity, the sequence identity will generally be higher when only conserved domains or motifs are considered.

[0234] A preferred TPS portion useful in the methods of the invention lacks the inhibitory domain at the N-terminal end described by Van Dijck et al. (2002) in Biochem J 2002, 366:63-71. An Example of such portion is provided in Table A4 as represented by SEQ ID NO: 273 or SEQ ID NO:275.

[0235] A TPS-TPP polypeptide of the invention may be of synthetic origin such as the polypeptide represented by SEQ ID NO: 441, SEQ ID NO: 443, SEQ ID NO: 445 or from natural origin such as the polypeptides represented by SEQ ID NO: 446-454.

[0236] Methods to synthetically make protein fusions are well known in the art. Plasmid vectors specifically suitable to make proteins fusions and express them into plants have been developed (Karimi et al. Plant Physiol. Vol. 145, 2007). For example methods to make protein or gene fusion involving cloning of end-to-end PCR fragments have been described (Magnani et al. (2006). BMC Mol. Biol. 7:46). The different active portions in a bifunctional protein fusion may be separated by linked as described by Arai et al. (2001). Protein Engineering 14:529-532 or Perham R (1991). Biochemistry 30, 8501-8512. Tools to assist on the design of suitable bifunctional protein fusions have been described (Xue et al. (2004). Nucl. Acid Res. 32:W562-565). Direct gene synthesis is also known in the art. Tools to facilate the design of the gene to be optimized including suitable codon optimisations have been described (Villalobos et al. 2006. BMC Bioinformatics 7:285).

[0237] The terms “domain”, “signature” and “motif” are defined in the “definitions” section herein.

[0238] Concerning CLC-like polypeptides, the polypeptide sequence which when used in the construction of a phylogenetic tree, such as the one depicted in FIG. 3, preferably clusters with the group of CLC-like polypeptides comprising the amino acid sequence represented by SEQ ID NO: 2 rather than with any other anion channel proteins like Aluminium Tolerance (ALMT) Anion Channels or Slow Anion Channels (SLAC), or with the glutamate receptor homologue family (Ward et al, Annu. Rev. Physiol. 71, 59-82, 2009; Brenner et al, Plant Physiol. 124, 1615-1624, 2000).

[0239] Furthermore, CLC-like polypeptides (at least in their native form) typically have nitrate/H⁺ exchanging activity. Tools and techniques for measuring anion transporting activity are well known in the art, for example by complementation of yeast mutants (Marmagne et al., J. Exp. Bot. 58, 3385-3393, 2007) or complementation of Arabidopsis mutants (De Angeli, 2009). Further details are provided in Example 6.

[0240] In addition, CLC-like polypeptides, when expressed in rice according to the methods of the present invention as outlined in Examples 7 and 8, give plants having increased yield related traits in comparison to control plants, in particular increased seed yield when grown under drought stress conditions.

[0241] Concerning osBURP-like polypeptides, the polypeptide sequence which when used in the construction of a phylogenetic tree, such as the one depicted in FIG. 7, preferably clusters with the group of OsBURP-like polypeptides belonging to the BURP V clade as defined by Ding et al., (Planta 2009, Vol. 230, pages 149-163) comprising the amino acid sequence represented by SEQ ID NO: 95 rather than with any other group.

[0242] Furthermore, expression of OsBURP-like polypeptides (at least in their native form) typically is induced by abiotic stress factors, such as drought. Tools and techniques for measuring abiotic stress, particularly drought tolerance, are well known in the art (see for example Ding et al., Planta 2009, Vol. 230, pages 149-163). Further details are provided in Example 6.

[0243] In addition, OsBURP-like polypeptides, when expressed in rice according to the methods of the present invention as outlined in Examples 7 and 8, give plants having increased yield related traits, in particular increased filling rate of seeds, and, thus, increased seed weight increased seed yield and increased harvest index.

[0244] Concerning AP2/ERF-like polypeptides, the polypeptide sequence which when used in the construction of a phylogenetic tree, such as the one depicted in FIG. 11, preferably clusters with the group of AP2/ERF polypeptides (eventually refer to a specific group defined in the literature) comprising the amino acid sequence represented by SEQ ID NO: 160 rather than with any other group.

[0245] Furthermore, AP2/ERF polypeptides (at least in their native form) typically have DNA-binding activity. Tools and techniques for measuring DNA-binding activity are well known in the art such as the ones described in Allen M D, et al. (EMBO J. 1998 Sep. 15; 17(18):5484-96).

[0246] In addition, AP2/ERF polypeptides, when expressed in rice according to the methods of the present invention as outlined in Examples 7 and 8, give plants having increased yield related traits, such as maximum height of a plant and, in particular total seed yield, fill rate, number of filled seeds and harvest index.

[0247] In addition, TPS-TPP polypeptides, when expressed in rice according to the methods of the present invention as outlined in the Examples section, give plants having increased yield related traits, in particular any one or more of increased number or size of floral meristems, increased number of florets, increased number of seeds.

[0248] Concerning CLC-like polypeptides, the present invention is illustrated by transforming plants with the nucleic acid sequence represented by SEQ ID NO: 1, encoding the polypeptide sequence of SEQ ID NO: 2. However, performance of the invention is not restricted to these sequences; the methods of the invention may advantageously be performed using any CLC-like-encoding nucleic acid or CLC-like polypeptide as defined herein.

[0249] Examples of nucleic acids encoding CLC-like polypeptides are given in Table A1 of the Examples section herein. Such nucleic acids are useful in performing the methods of the invention. The amino acid sequences given in Table A1 of the Examples section are example sequences of orthologues and paralogues of the CLC-like polypeptide represented by SEQ ID NO: 2, the terms “orthologues” and “paralogues” being as defined herein. Further orthologues and paralogues may readily be identified by performing a so-called reciprocal blast search as described in the definitions section; where the query sequence is SEQ ID NO: 1 or SEQ ID NO: 2, the second BLAST (back-BLAST) would be against rice sequences.

[0250] Concerning osBURP-like polypeptides, the present invention is illustrated by transforming plants with the nucleic acid sequence represented by SEQ ID NO: 94, encoding the polypeptide sequence of SEQ ID NO: 95. However, performance of the invention is not restricted to these sequences; the methods of the invention may advantageously be performed using any OsBURP-like-encoding nucleic acid or OsBURP-like polypeptide as defined herein.

[0251] Examples of nucleic acids encoding OsBURP-like polypeptides are given in Table A2 of the Examples section herein. Such nucleic acids are useful in performing the methods of the invention. The amino acid sequences given in Table A2 of the Examples section are example sequences of orthologues and paralogues of the OsBURP-like polypeptide represented by SEQ ID NO: 95, the terms “orthologues” and “paralogues” being as defined herein. Further orthologues and paralogues may readily be identified by performing a so-called reciprocal blast search as described in the definitions section; where the query sequence is SEQ ID NO: 94 or SEQ ID NO: 95, the second BLAST (back-BLAST) would be against rice sequences.

[0252] The present invention is illustrated by transforming plants with the nucleic acid sequence represented by SEQ ID NO: 159, encoding the polypeptide sequence of SEQ ID NO: 160. However, performance of the invention is not restricted to these sequences; the methods of the invention may advantageously be performed using any AP2/ERF-encoding nucleic acid or AP2/ERF polypeptide as defined herein.

[0253] Examples of nucleic acids encoding AP2/ERF polypeptides are given in Table A3 of the Examples section herein. Such nucleic acids are useful in performing the methods of the invention. The amino acid sequences given in Table A3 of the Examples section are example sequences of orthologues and paralogues of the AP2/ERF polypeptide represented by SEQ ID NO: 160, the terms “orthologues” and “paralogues” being as defined herein. Further orthologues and paralogues may readily be identified by performing a so-called reciprocal blast search as described in the definitions section; where the query sequence is SEQ ID NO: 159 or SEQ ID NO: 160, the second BLAST (back-BLAST) would be against rice sequences.

[0254] The present invention is illustrated by transforming plants with the nucleic acid sequence represented by SEQ ID NO: 440, 442 and 444 encoding the polypeptide sequence of SEQ ID NO: 441, 443 and 445 respectively. However, performance of the invention is not restricted to these sequences; the methods of the invention may advantageously be performed using any TPS-TPS-encoding nucleic acid or TPS-TPP polypeptide as defined herein.

[0255] Alternatively the methods of the invention maybe performed by simultaneously expressing or generating in a plant both enzymatic activities, a TPS and a TPP. Methods to simultaneously express both activities are well known in the art. For example the following nucleic acids may be modulated in a plant or in a plant cell: a first nucleic acid encoding a TPS polypeptide or an active portion thereof, and a second nucleic acid encoding a TPP polypeptide or an active portion thereof, wherein the first and second nucleic acids are comprised in a single or in multiple, at least two, nucleic acid molecules. Modulation of such nucleic acids may be performed by introducing and expressing such one or more nucleic acids in a plant, preferably under the control of promoters having the same tissue distribution and similar strength, most preferably using the same promoter.

[0256] Accordingly, the present invention provides a method for enhancing yield-related traits comprising modulating expression in the plant of:
[0257] (i) a nucleic acid encoding a TPS-TPP protein fusion; or
[0258] (ii) a first nucleic acid encoding a TPS polypeptide or an active portion thereof, and a second nucleic acid encoding a TPP polypeptide or an active portion thereof, wherein the first and second nucleic acids are comprised in a single or in multiple, at least two, nucleic acid molecules; or
[0259] (iii) said one or more nucleic acids of (i) and (ii) further comprising a sequence encoding a chloroplast targeting signal.

[0260] The invention further provides plants obtainable with such method.

[0261] Preferably the polynucleotides useful in the methods of the invention are modulated in the chloroplast of a plant cell. Accordingly, the polypeptides useful in the methods of the invention preferably are targeted to the chloroplast. Chloroplast transit peptides useful to transport polypeptides into the chloroplast have been described (Table 3 and SEQ ID NOs: 470 to 491). Advantageously the polynucleotides of the invention may be introduced and expressed in the chloroplast for example by direct transformation of Chloroplast. Said methods are well known in the art.

TABLE 3
Chloroplastic transit peptides

| Description transit peptide | SEQ ID NO: |
|---|---|
| From Arabidopsis thalana P450 protein (AEB16913) | 470 |
| Transit peptide from Arabidopsis COS1 (COI1 suppressor 1) | 471 |
| Transit peptide From tomato rubisco small subunit (AAM50960) | 472 |
| Transit peptide corn SSU (AEE66528) | 473 |
| Transit peptide from corn AS1 | 474 |
| Transit peptide from corn AS2 | 475 |
| Transit peptide spinach (AAY97391) | 476 |
| Transint peptide Ipomea batata ADP-glucose phosphorylase | 477 |
| Transit peptide from rice SGR (stay green gene, Os09g0532000) | 478 |
| Transit peptide from soybean rubisco small subunit precursor (AAA82069) | 479 |
| Transit peptide from Populus alba isoprene synthase (ABV04402) | 480 |
| Modified transit peptide for chloroplast targeting (CAA48415) | 481 |
| Transit peptide from Arabidopsis RbcS-TP | 482 |
| Transit peptide from Arabidopsis E1alpha subunit of pyruvate dehydrogenase | 483 |
| Transit peptide from pea Carbonic anhydrase | 484 |
| Transit peptide from Flaveria pringlei CA3 | 485 |
| 88 aa non canonical TP from Pea | 486 |
| Transit peptide from Arabiodpsis BCCP | 487 |
| Transit peptide from Arabiodpsis GLU2 | 488 |
| Transit peptide from ATP synthase delta subunit protein of Bigelowiella | 489 |
| natans (chlorarachniophyte algae) | |
| Transit peptide from Fdx1 of Bigelowiella natans (chlorarachniophyte algae) | 490 |
| Transit peptide from RpL28 of Bigelowiella natans (chlorarachniophyte algae) | 491 |

[0262] Alternative methods to increase or generate TPS and TPP activity in a plant exist, for example by crossing plant having increased or generated individual TPS or TPP activity, for example using transgenic technology.

[0263] Methods for introducing and expressing two or more transgenes (also called gene stacking) in transgenic plants are well known in the art (see for example, a review by Halpin (2005) Plant Biotech J (3): 141-155. Gene stacking can proceed by interactive steps, where two or more transgenes can be sequentially introduced into a plant by crossing a plant containing one transgene with individuals harbouring other transgenes or, alternatively, by re-transforming (or super-transforming) a plant containing one transgene with new genes. The two or more transgenes maybe introduced simultaneously by transformation with for example a culture of mix Agroacterium tumefaciens strains harbouring each of the transgenes of to be introduced in the plant.

[0264] Examples of nucleic acids encoding TPS, TPP and TPS-TPP polypeptides are given in Tables A4 to A6 of the Examples section herein. Such nucleic acids are useful in performing the methods of the invention. The amino acid sequences given in Table A4 to A6 of the Examples section, are example sequences of orthologues and paralogues of the polypeptides used to transformed rice plants according to the Example section. Further orthologues and paralogues may readily be identified by performing a so-called reciprocal blast search as described in the definitions section.

[0265] The invention also provides hitherto unknown TPS-encoding and TPP-encoding nucleic acids and TPS and TPP polypeptides useful for conferring enhanced yield-related traits in plants relative to control plants.

[0266] According to a further embodiment of the present invention, there is therefore provided an isolated nucleic acid molecule selected from:
[0267] (i) a nucleic acid represented by any one of the sequences of Table A4 and Table A5;
[0268] (ii) the complement of a nucleic acid represented by any one of the sequences of Table A4 and Table A5;
[0269] (iii) a nucleic acid encoding a TPS or a TPP polypeptide having in increasing order of preference at least 50%, 51%, 52%, 53%, 54%, 55%, 56%, 57%, 58%, 59%, 60%, 61%, 62%, 63%, 64%, 65%, 66%, 67%, 68%, 69%, 70%, 71%, 72%, 73%, 74%, 75%, 76%, 77%, 78%, 79%, 80%, 81%, 82%, 83%, 84%, 85%, 86%, 87%, 88%, 89%, 90%, 91%, 92%, 93%, 94%, 95%, 96%, 97%, 98%, or 99% sequence identity to the amino acid sequence represented by any of the polypeptides of Table A4 or Table A5 respectively and further preferably conferring enhanced yield-related traits relative to control plants.
[0270] (iv) a nucleic acid molecule which hybridizes with a nucleic acid molecule of (i) to (iii) under high stringency hybridization conditions and preferably confers enhanced yield-related traits relative to control plants.

[0271] According to a further embodiment of the present invention, there is also provided an isolated polypeptide selected from:
[0272] (i) an amino acid sequence represented by any one of the sequences of Tables A4 and A5;
[0273] (ii) an amino acid sequence having, in increasing order of preference, at least 50%, 51%, 52%, 53%, 54%, 55%, 56%, 57%, 58%, 59%, 60%, 61%, 62%, 63%, 64%, 65%, 66%, 67%, 68%, 69%, 70%, 71%, 72%, 73%, 74%, 75%, 76%, 77%, 78%, 79%, 80%, 81%, 82%, 83%, 84%, 85%, 86%, 87%, 88%, 89%, 90%, 91%, 92%, 93%, 94%, 95%, 96%, 97%, 98%, or 99% sequence identity to the amino acid sequence represented by any one of the sequences of Tables A4 and A5 and further preferably conferring enhanced yield-related traits relative to control plants;
[0274] (iii) derivatives of any of the amino acid sequences given in (i) or (ii) above.

[0275] Alternatively transgenes maybe stacked by sequential retransformation with each gene.

[0276] Nucleic acid variants may also be useful in practicing the methods of the invention. Examples of such variants include nucleic acids encoding homologues and derivatives of any one of the amino acid sequences given in Table A1 to A6 of the Examples section, the terms “homologue” and “derivative” being as defined herein. Also useful in the methods of the invention are nucleic acids encoding homologues and derivatives of orthologues or paralogues of any one of the amino acid sequences given in Table A1 to A6 of the Examples section. Homologues and derivatives useful in the methods of the present invention have substantially the same biological and functional activity as the unmodified protein from which they are derived. Further variants useful in practicing the methods of the invention are variants in which codon usage is optimised or in which miRNA target sites are removed.

[0277] Further nucleic acid variants useful in practicing the methods of the invention include portions of nucleic acids encoding CLC-like polypeptides, or OsBURP-like polypeptides, or AP2/ERF polypeptides, or TPS, TPP and TPS-TPP polypeptides, nucleic acids hybridising to nucleic acids encoding CLC-like polypeptides, or OsBURP-like polypeptides, or AP2/ERF polypeptides, or TPS, TPP and TPS-TPP polypeptides, splice variants of nucleic acids encoding CLC-like polypeptides, or OsBURP-like polypeptides, or AP2/ERF polypeptides, or TPS, TPP and TPS-TPP polypeptides, allelic variants of nucleic acids encoding CLC-like polypeptides, or OsBURP-like polypeptides, or AP2/ERF polypeptides, or TPS, TPP and TPS-TPP polypeptides, and variants of nucleic acids encoding CLC-like polypeptides, or OsBURP-like polypeptides, or AP2/ERF polypeptides, or TPS, TPP and TPS-TPP polypeptides obtained by gene shuffling. The terms hybridising sequence, splice variant, allelic variant and gene shuffling are as described herein.

[0278] Nucleic acids encoding CLC-like polypeptides, or OsBURP-like polypeptides, or AP2/ERF polypeptides, or TPS, TPP and TPS-TPP polypeptides, need not be full-length nucleic acids, since performance of the methods of the invention does not rely on the use of full-length nucleic acid sequences. According to the present invention, there is provided a method for enhancing yield-related traits in plants, comprising introducing and expressing in a plant a portion of any one of the nucleic acid sequences given in Table A1 to A6 of the Examples section, or a portion of a nucleic acid encoding an orthologue, paralogue or homologue of any of the amino acid sequences given in Table A1 to A6 of the Examples section.

[0279] A portion of a nucleic acid may be prepared, for example, by making one or more deletions to the nucleic acid. The portions may be used in isolated form or they may be fused to other coding (or non-coding) sequences in order to, for example, produce a protein that combines several activities. When fused to other coding sequences, the resultant polypeptide produced upon translation may be bigger than that predicted for the protein portion.

[0280] Concerning CLC-like polypeptides, portions useful in the methods of the invention, encode a CLC-like polypeptide as defined herein, and have substantially the same biological activity as the amino acid sequences given in Table A1 of the Examples section. Preferably, the portion is a portion of any one of the nucleic acids given in Table A1 of the Examples section, or is a portion of a nucleic acid encoding an orthologue or paralogue of any one of the amino acid sequences given in Table A1 of the Examples section. Preferably the portion is at least 500, 550, 600, 650, 700, 750, 800, 850, 900, 950, 1000, 1050, 1100, 1150, 1200, 1250, 1300, 1350, 1400, 1450, 1500, 1550, 1600, 1650, 1700, 1750, 1800, 1850, 1900, 1950, 2000, 2050, 2100, 2150, 2200, 2250, 2300, 2350, 2400 consecutive nucleotides in length, the consecutive nucleotides being of any one of the nucleic acid sequences given in Table A1 of the Examples section, or of a nucleic acid encoding an orthologue or paralogue of any one of the amino acid sequences given in Table A1 of the Examples section. Most preferably the portion is a portion of the nucleic acid of SEQ ID NO: 1. Preferably, the portion encodes a fragment of an amino acid sequence which, when used in the construction of a phylogenetic tree, such as the one depicted in FIG. 3, clusters with the group of CLC-like polypeptides comprising the amino acid sequence represented by SEQ ID NO: 2 rather than with any other anion channel proteins like Aluminium Tolerance (ALMT) Anion Channels or Slow Anion Channels (SLAC), or with the glutamate receptor homologue family (Ward et al, Annu. Rev. Physiol. 71, 59-82, 2009; Brenner et al, Plant Physiol. 124, 1615-1624, 2000) and/or comprises one or more of the motifs 1 to 8.

[0281] Concerning osBURP-like polypeptides, portions useful in the methods of the invention, encode an OsBURP-like polypeptide as defined herein, and have substantially the same biological activity as the amino acid sequences given in Table A2 of the Examples section. Preferably, the portion is a portion of any one of the nucleic acids given in Table A2 of the Examples section, or is a portion of a nucleic acid encoding an orthologue or paralogue of any one of the amino acid sequences given in Table A2 of the Examples section. Preferably the portion is at least 500, 550, 600, 650, 700, 750, 800, 850, 900, 950, 1000, 1050, 1100, 1150, 1200, 1250, 1300, 1350, 1400, 1450, 1500, 1550, 1600, 1650, 1700, 1750, 1800, 1850, 1900, 1950, 2000, 2050, 2100, 2150, 2200, 2250, 2300 consecutive nucleotides in length, the consecutive nucleotides being of any one of the nucleic acid sequences given in Table A2 of the Examples section, or of a nucleic acid encoding an orthologue or paralogue of any one of the amino acid sequences given in Table A2 of the Examples section. Most preferably the portion is a portion of the nucleic acid of SEQ ID NO: 94. Preferably, the portion encodes a fragment of an amino acid sequence which, when used in the construction of a phylogenetic tree, such as the one depicted in FIG. 7, clusters with the group of OsBURP-like polypeptides belonging to BURP V clade as defined by Ding et al., 2009, comprising the amino acid sequence represented by SEQ ID NO: 95 rather than with any other group, and/or comprises anyone of more of the motifs represented by SEQ ID NO: 140 to 155.

[0282] Concerning AP2/ERF-like polypeptides, portions useful in the methods of the invention, encode an AP2/ERF polypeptide as defined herein, and have substantially the same biological activity as the amino acid sequences given in Table A3 of the Examples section. Preferably, the portion is a portion of any one of the nucleic acids given in Table A3 of the Examples section, or is a portion of a nucleic acid encoding an orthologue or paralogue of any one of the amino acid sequences given in Table A3 of the Examples section. Preferably the portion is at least 500, 550, 600, 650, 700, 750, 800, 850, 900, 950, 1000 consecutive nucleotides in length, the consecutive nucleotides being of any one of the nucleic acid sequences given in Table A3 of the Examples section, or of a nucleic acid encoding an orthologue or paralogue of any one of the amino acid sequences given in Table A3 of the Examples section. Most preferably the portion is a portion of the nucleic acid of SEQ ID NO: 159. Preferably, the portion encodes a fragment of an amino acid sequence which, when used in the construction of a phylogenetic tree, such as the one depicted in FIG. 11, clusters with the group of AP2/ERF polypeptides comprising the amino acid sequence represented by SEQ ID NO: 160 rather than with any other group AND/OR: comprises motifs 25 to 28 AND/OR has DNA-binding activity AND/OR: has at least 49% sequence identity to SEQ ID NO: 160.

[0283] Concerning TPS-TPP-like polypeptides, portions useful in the methods of the invention, encode a TPS, TPP and TPS-TPP polypeptide as defined herein, and have substantially the same biological activity as the amino acid sequences given in Table A4 to A6 of the Examples section. Preferably, the portion is a portion of any one of the nucleic acids given in Table A4 to A6 of the Examples section, or is a portion of a nucleic acid encoding an orthologue or paralogue of any one of the amino acid sequences given in Table A4 to A6 of the Examples section. Preferably the portion is at least 100, 200, 300, 400, 500, 550, 600, 650, 700, 750, 800, 850, 900, 950, 1000 consecutive nucleotides in length, the consecutive nucleotides being of any one of the nucleic acid sequences given in Table A4 to A6 of the Examples section, or of a nucleic acid encoding an orthologue or paralogue of any one of the amino acid sequences given in Table A4 to A6 of the Examples section. Most preferably the portion is a portion of the nucleic acid of SEQ ID NO: 272. Preferably, the portion encodes a fragment of an amino acid sequence comprising the pfam domains according to the definition section herein

[0284] Another nucleic acid variant useful in the methods of the invention is a nucleic acid capable of hybridising, under reduced stringency conditions, preferably under stringent conditions, with a nucleic acid encoding a CLC-like polypeptide, or an OsBURP-like polypeptide, or an AP2/ERF polypeptide, or a TPS, TPP and TPS-TPP polypeptide as defined herein, or with a portion as defined herein.

[0285] According to the present invention, there is provided a method for enhancing yield-related traits in plants, comprising introducing and expressing in a plant a nucleic acid capable of hybridizing to any one of the nucleic acids given in Table A1 to A6 of the Examples section, or comprising introducing and expressing in a plant a nucleic acid capable of hybridising to a nucleic acid encoding an orthologue, paralogue or homologue of any of the nucleic acid sequences given in Table A1 to A6 of the Examples section.

[0286] Concerning CLC-like polypeptides, hybridising sequences useful in the methods of the invention encode a CLC-like polypeptide as defined herein, having substantially the same biological activity as the amino acid sequences given in Table A1 of the Examples section. Preferably, the hybridising sequence is capable of hybridising to the complement of any one of the nucleic acids given in Table A1 of the Examples section, or to a portion of any of these sequences, a portion being as defined above, or the hybridising sequence is capable of hybridising to the complement of a nucleic acid encoding an orthologue or paralogue of any one of the amino acid sequences given in Table A1 of the Examples section. Most preferably, the hybridising sequence is capable of hybridising to the complement of a nucleic acid as represented by SEQ ID NO: 1 or to a portion thereof.

[0287] Preferably, the hybridising sequence encodes a polypeptide with an amino acid sequence which, when full-length and used in the construction of a phylogenetic tree, such as the one depicted in FIG. 3, clusters with the group of CLC-like polypeptides comprising the amino acid sequence represented by SEQ ID NO: 2 rather than with any other anion channel proteins like Aluminium Tolerance (ALMT) Anion Channels or Slow Anion Channels (SLAC), or with the glutamate receptor homologue family (Ward et al, Annu. Rev. Physiol. 71, 59-82, 2009; Brenner et al, Plant Physiol. 124, 1615-1624, 2000) and/or comprises one or more of the motifs 1 to 8.

[0288] Concerning osBURP-like polypeptides, hybridising sequences useful in the methods of the invention encode an OsBURP-like polypeptide as defined herein, having substantially the same biological activity as the amino acid sequences given in Table A2 of the Examples section. Preferably, the hybridising sequence is capable of hybridising to the complement of any one of the nucleic acids given in Table A2 of the Examples section, or to a portion of any of these sequences, a portion being as defined above, or the hybridising sequence is capable of hybridising to the complement of a nucleic acid encoding an orthologue or paralogue of any one of the amino acid sequences given in Table A2 of the Examples section. Most preferably, the hybridising sequence is capable of hybridising to the complement of a nucleic acid as represented by SEQ ID NO: 94 or to a portion thereof.

[0289] Preferably, the hybridising sequence encodes a polypeptide with an amino acid sequence which, when full-length and used in the construction of a phylogenetic tree, such as the one depicted in FIG. 7, clusters with the group of OsBURP-like polypeptides belonging to BURP V clade as defined by Ding et al., 2009, comprising the amino acid sequence represented by SEQ ID NO: 95 rather than with any other group and/or comprises anyone or more of the motifs represented by SEQ ID NO: 140 to 155.

[0290] Concerning AP2/ERF-like polypeptides, hybridising sequences useful in the methods of the invention encode an AP2/ERF polypeptide as defined herein, having substantially the same biological activity as the amino acid sequences given in Table A3 of the Examples section. Preferably, the hybridising sequence is capable of hybridising to the complement of any one of the nucleic acids given in Table A3 of the Examples section, or to a portion of any of these sequences, a portion being as defined above, or the hybridising sequence is capable of hybridising to the complement of a nucleic acid encoding an orthologue or paralogue of any one of the amino acid sequences given in Table A3 of the Examples section. Most preferably, the hybridising sequence is capable of hybridising to the complement of a nucleic acid as represented by SEQ ID NO: 159 or to a portion thereof.

[0291] Preferably, the hybridising sequence encodes a polypeptide with an amino acid sequence which, when full-length and used in the construction of a phylogenetic tree, such as the one depicted in FIG. 11, clusters with the group of AP2/ERF polypeptides comprising the amino acid sequence represented by SEQ ID NO: 160 rather than with any other group group AND/OR: comprises motifs 25 to 28 AND/OR has DNA-binding activity AND/OR: has at least 49% sequence identity to SEQ ID NO: 160.

[0292] Hybridising sequences useful in the methods of the invention encode a TPS, TPP and TPS-TPP polypeptide as defined herein, having substantially the same biological activity as the amino acid sequences given in Table A4 to A6 of the Examples section. Preferably, the hybridising sequence is capable of hybridising to the complement of any one of the nucleic acids given in Table A4 to A6 of the Examples section, or to a portion of any of these sequences, a portion being as defined above, or the hybridising sequence is capable of hybridising to the complement of a nucleic acid encoding an orthologue or paralogue of any one of the amino acid sequences given in Table A4 to A6 of the Examples section. Most preferably, the hybridising sequence is capable of hybridising to the complement of a nucleic acid as represented by SEQ ID NO: 272, or SEQ ID NO: 440 or SEQ ID NO: 442 or to a portion thereof.

[0293] Preferably, the hybridising sequence encodes a polypeptide with an amino acid sequence comprising the pfam domains according to the definition section herein.

[0294] Another nucleic acid variant useful in the methods of the invention is a splice variant encoding a CLC-like polypeptide, or an OsBURP-like polypeptide, or an AP2/ERF polypeptide, or a TPS, TPP and TPS-TPP, as defined hereinabove, a splice variant being as defined herein.

[0295] According to the present invention, there is provided a method for enhancing yield-related traits in plants, comprising introducing and expressing in a plant a splice variant of any one of the nucleic acid sequences given in Table A1 to A6 of the Examples section, or a splice variant of a nucleic acid encoding an orthologue, paralogue or homologue of any of the amino acid sequences given in Table A1 to A6 of the Examples section.

[0296] Concerning CLC-like polypeptides, preferred splice variants are splice variants of a nucleic acid represented by SEQ ID NO: 1, or a splice variant of a nucleic acid encoding an orthologue or paralogue of SEQ ID NO: 2. Preferably, the amino acid sequence encoded by the splice variant, when used in the construction of a phylogenetic tree, such as the one depicted in FIG. 3, clusters with the group of CLC-like polypeptides comprising the amino acid sequence represented by SEQ ID NO: 2 rather than with any other anion channel proteins like Aluminium Tolerance (ALMT) Anion Channels or Slow Anion Channels (SLAC), or with the glutamate receptor homologue family (Ward et al, Annu. Rev. Physiol. 71, 59-82, 2009; Brenner et al, Plant Physiol. 124, 1615-1624, 2000) and/or comprises one or more of the motifs 1 to 8.

[0297] Concerning osBURP-like polypeptides, preferred splice variants are splice variants of a nucleic acid represented by SEQ ID NO: 94, or a splice variant of a nucleic acid encoding an orthologue or paralogue of SEQ ID NO: 95. Preferably, the amino acid sequence encoded by the splice variant, when used in the construction of a phylogenetic tree, such as the one depicted FIG. 7, clusters with the group of OsBURP-like polypeptides belonging to BURP V clade as defined by Ding et al., 2009, comprising the amino acid sequence represented by SEQ ID NO: 95 rather than with any other group and/or comprises anyone or more of the motifs represented by SEQ ID NO: 140 to 155.

[0298] Concerning AP2/ERF-like polypeptides, preferred splice variants are splice variants of a nucleic acid represented by SEQ ID NO: 159, or a splice variant of a nucleic acid encoding an orthologue or paralogue of SEQ ID NO: 160. Preferably, the amino acid sequence encoded by the splice variant, when used in the construction of a phylogenetic tree, such as the one depicted in FIG. 11, clusters with the group of AP2/ERF polypeptides comprising the amino acid sequence represented by SEQ ID NO: 160 rather than with any other group AND/OR: comprises motifs 25 to 28 AND/OR has DNA-binding activity AND/OR: has at least 49% sequence identity to SEQ ID NO: 160.

[0299] Concerning TPS-TPP-like polypeptides, preferred splice variants are splice variants of a nucleic acid represented by the nucleic acids used to transform rice plants according to the methods of the invention, or a splice variant of a nucleic acid encoding an orthologue or paralogue of the respective encoded polypeptides. Preferably, the amino acid sequence encoded by the splice variant, comprise the pfam domains according to the definition section herein.

[0300] Another nucleic acid variant useful in performing the methods of the invention is an allelic variant of a nucleic acid encoding a CLC-like polypeptide, or an OsBURP-like polypeptide, or an AP2/ERF polypeptide, or a TPS, TPP and TPS-TPP, as defined hereinabove, an allelic variant being as defined herein.

[0301] According to the present invention, there is provided a method for enhancing yield-related traits in plants, comprising introducing and expressing in a plant an allelic variant of any one of the nucleic acids given in Table A1 to A6 of the Examples section, or comprising introducing and expressing in a plant an allelic variant of a nucleic acid encoding an orthologue, paralogue or homologue of any of the amino acid sequences given in Table A1 to A6 of the Examples section.

[0302] Concerning CLC-like polypeptides, the polypeptides encoded by allelic variants useful in the methods of the present invention have substantially the same biological activity as the CLC-like polypeptide of SEQ ID NO: 2 and any of the amino acids depicted in Table A1 of the Examples section. Allelic variants exist in nature, and encompassed within the methods of the present invention is the use of these natural alleles. Preferably, the allelic variant is an allelic variant of SEQ ID NO: 1 or an allelic variant of a nucleic acid encoding an orthologue or paralogue of SEQ ID NO: 2. Preferably, the amino acid sequence encoded by the allelic variant, when used in the construction of a phylogenetic tree, such as the one depicted in FIG. 3, clusters with the group of CLC-like polypeptides comprising the amino acid sequence represented by SEQ ID NO: 2 rather than with any other anion channel proteins like Aluminium Tolerance (ALMT) Anion Channels or Slow Anion Channels (SLAC), or with the glutamate receptor homologue family (Ward et al, Annu. Rev. Physiol. 71, 59-82, 2009; Brenner et al, Plant Physiol. 124, 1615-1624, 2000) and/or comprises one or more of the motifs 1 to 8.

[0303] Concerning osBURP-like polypeptides, the polypeptides encoded by allelic variants useful in the methods of the present invention have substantially the same biological activity as the OsBURP-like polypeptide of SEQ ID NO: 95 and any of the amino acids depicted in Table A2 of the Examples section. Allelic variants exist in nature, and encompassed within the methods of the present invention is the use of these natural alleles. Preferably, the allelic variant is an allelic variant of SEQ ID NO: 94 or an allelic variant of a nucleic acid encoding an orthologue or paralogue of SEQ ID NO: 95. Preferably, the amino acid sequence encoded by the allelic variant, when used in the construction of a phylogenetic tree, such as the one depicted in FIG. 7, clusters with the group of OsBURP-like polypeptides belonging to BURP V clade as defined by Ding et al., 2009, comprising the amino acid sequence represented by SEQ ID NO: 95 rather than with any other group and/or comprises anyone or more of the motifs represented by SEQ ID NO: 140 to 155.

[0304] Concerning AP2/ERF-like polypeptides, the polypeptides encoded by allelic variants useful in the methods of the present invention have substantially the same biological activity as the AP2/ERF polypeptide of SEQ ID NO: 160 and any of the amino acids depicted in Table A3 of the Examples section. Allelic variants exist in nature, and encompassed within the methods of the present invention is the use of these natural alleles. Preferably, the allelic variant is an allelic variant of SEQ ID NO: 159 or an allelic variant of a nucleic acid encoding an orthologue or paralogue of SEQ ID NO: 160. Preferably, the amino acid sequence encoded by the allelic variant, when used in the construction of a phylogenetic tree, such as the one depicted in FIG. 11, clusters with the AP2/ERF polypeptides comprising the amino acid sequence represented by SEQ ID NO: 160 rather than with any other group AND/OR: comprises motifs 25 to 28 AND/OR has DNA-binding activity AND/OR: has at least 49% sequence identity to SEQ ID NO: 160.

[0305] Concerning TPS-TPP-like polypeptides, the polypeptides encoded by allelic variants useful in the methods of the present invention have substantially the same biological activity as the TPS, TPP and TPS-TPP polypeptide as used to transformed rice plants in the Examples herein and any of the amino acids depicted in Table A4 to A6 of the Examples section. Allelic variants exist in nature, and encompassed within the methods of the present invention is the use of these natural alleles. Preferably, the allelic variant is an allelic variant useful in the invention comprise the pfam domains according to the definition section herein.

[0306] Gene shuffling or directed evolution may also be used to generate variants of nucleic acids encoding CLC-like polypeptides, or OsBURP-like polypeptides, or AP2/ERF polypeptides, or TPS, TPP and TPS-TPP polypeptides, as defined above; the term “gene shuffling” being as defined herein.

[0307] According to the present invention, there is provided a method for enhancing yield-related traits in plants, comprising introducing and expressing in a plant a variant of any one of the nucleic acid sequences given in Table A1 to A6 of the Examples section, or comprising introducing and expressing in a plant a variant of a nucleic acid encoding an orthologue, paralogue or homologue of any of the amino acid sequences given in Table A1 to A6 of the Examples section, which variant nucleic acid is obtained by gene shuffling.

[0308] Concerning CLC-like polypeptides, the amino acid sequence encoded by the variant nucleic acid obtained by gene shuffling, when used in the construction of a phylogenetic tree such as the one depicted in FIG. 3, preferably clusters with the group of CLC-like polypeptides comprising the amino acid sequence represented by SEQ ID NO: 2 rather than with any other anion channel proteins like Aluminium Tolerance (ALMT) Anion Channels or Slow Anion Channels (SLAC), or with the glutamate receptor homologue family (Ward et al, Annu. Rev. Physiol. 71, 59-82, 2009; Brenner et al, Plant Physiol. 124, 1615-1624, 2000) and/or comprises one or more of the motifs 1 to 8.

[0309] Concerning osBURP-like polypeptides, the amino acid sequence encoded by the variant nucleic acid obtained by gene shuffling, when used in the construction of a phylogenetic tree such as the one depicted in FIG. 7, preferably clusters with the group of OsBURP-like polypeptides belonging to BURP V clade as defined by Ding et al., 2009, comprising the amino acid sequence represented by SEQ ID NO: 95 rather than with any other group and/or comprises anyone or more of the motifs represented by SEQ ID NO: 140 to 155.

[0310] Concerning AP2/ERF-like polypeptides, the amino acid sequence encoded by the variant nucleic acid obtained by gene shuffling, when used in the construction of a phylogenetic tree such as the one depicted in FIG. 11, preferably clusters with the group of AP2/ERF polypeptides comprising the amino acid sequence represented by SEQ ID NO: 160 rather than with any other group AND/OR: comprises motifs 25 to 28 AND/OR has DNA-binding activity AND/OR: has at least 49% sequence identity to SEQ ID NO: 160.

[0311] Concerning TPS-TPP-like polypeptides, the amino acid sequence encoded by the variant nucleic acid obtained by gene shuffling, preferably comprise the pfam domains according to the definition section herein.

[0312] Furthermore, nucleic acid variants may also be obtained by site-directed mutagenesis. Several methods are available to achieve site-directed mutagenesis, the most common being PCR based methods (Current Protocols in Molecular Biology. Wiley Eds.).

[0313] Concerning CLC-like polypeptides, nucleic acids encoding CLC-like polypeptides may be derived from any natural or artificial source. The nucleic acid may be modified from its native form in composition and/or genomic environment through deliberate human manipulation. Preferably the CLC-like polypeptide-encoding nucleic acid is from a plant, further preferably from a monocotyledonous plant, more preferably from the family Poaceae, most preferably the nucleic acid is from Oryza sativa.

[0314] Concerning osBURP-like polypeptides, nucleic acids encoding OsBURP-like polypeptides may be derived from any natural or artificial source. The nucleic acid may be modified from its native form in composition and/or genomic environment through deliberate human manipulation. Preferably the OsBURP-like polypeptide-encoding nucleic acid is from a plant, further preferably from a monocotyledonous plant, more preferably from the family Poaceae, most preferably the nucleic acid is from Oryza sativa.

[0315] Concerning AP2/ERF-like polypeptides, nucleic acids encoding AP2/ERF polypeptides may be derived from any natural or artificial source. The nucleic acid may be modified from its native form in composition and/or genomic environment through deliberate human manipulation. Preferably the AP2/ERF polypeptide-encoding nucleic acid is from a plant, further preferably from a dicotyledonous plant, more preferably from the family Fabaceae, most preferably the nucleic acid is from Medicago truncatula.

[0316] Concerning TPS-TPP-like polypeptides, nucleic acids encoding TPS, TPP, TPS-TPP polypeptides may be derived from any natural or artificial source. The nucleic acid may be modified from its native form in composition and/or genomic environment through deliberate human manipulation. Preferably the PTPS, TPP, TPS-TPP polypeptide-encoding nucleic acid is from a plant, further preferably from a monocotyledonous plant, more preferably from the family Brassicaceae, most preferably the nucleic acid is from Arabidopsis thaliana or from the yeast Saccharomyces cerevisie.

[0317] Performance of the methods of the invention gives plants having enhanced yield-related traits. In particular performance of the methods of the invention gives plants having increased yield, especially increased seed yield relative to control plants. The terms “yield” and “seed yield” are described in more detail in the “definitions” section herein.

[0318] Concerning CLC-like polypeptides, or OsBURP-like polypeptides, or AP2/ERF polypeptides, reference herein to enhanced yield-related traits is taken to mean an increase early vigour and/or in biomass (weight) of one or more parts of a plant, which may include aboveground (harvestable) parts and/or (harvestable) parts below ground. In particular, such harvestable parts are seeds, and performance of the methods of the invention results in plants having increased seed yield relative to the seed yield of control plants.

[0319] Concerning TPS-TPP-like polypeptides, reference herein to enhanced yield-related traits is taken to mean an increase early vigour and/or in biomass (weight) of one or more parts of a plant, which may include aboveground (harvestable) parts and/or (harvestable) parts below ground. Furthermore it is taken to mean any one or more of increased size or number of floral meristems, increased number of flowers, increased number of seeds, increased yield, preferably increased biomass and/or increased seed weight relative to control plants. In particular, such harvestable parts are seeds, and performance of the methods of the invention results in plants having increased seed yield relative to the seed yield of control plants.

[0320] The present invention provides a method for increasing yield-related traits, especially seed yield of plants, relative to control plants, which method comprises modulating expression in a plant of a nucleic acid encoding a CLC-like polypeptide, or an OsBURP-like polypeptide, or an AP2/ERF polypeptide, as defined herein.

[0321] Concerning TPS-TPP-like polypeptides, the present invention provides a method for enhancing or increasing (yield-related traits—yield), especially size and/or number of floral meristems, number of flowers and/or florets, number of seeds, seed yield and biomass of plants, relative to control plants, which method comprises modulating expression in a plant of a nucleic acid encoding a TPS, TPP or TPS-TPP polypeptide as defined herein.

[0322] Since the transgenic plants according to the present invention have increased yield related traits, it is likely that these plants exhibit an increased growth rate (during at least part of their life cycle), relative to the growth rate of control plants at a corresponding stage in their life cycle.

[0323] According to a preferred feature of the present invention, performance of the methods of the invention gives plants having an increased growth rate relative to control plants. Therefore, according to the present invention, there is provided a method for increasing the growth rate of plants, which method comprises modulating expression in a plant of a nucleic acid encoding a CLC-like polypeptide, or an OsBURP-like polypeptide, or an AP2/ERF polypeptide, or a TPS, TPP and TPS-TPP polypeptide as defined herein.

[0324] Concerning CLC-like polypeptides, performance of the methods of the invention gives plants grown under non-stress conditions or under drought conditions increased yield relative to control plants grown under comparable conditions. Therefore, according to the present invention, there is provided a method for increasing yield in plants grown under non-stress conditions or under drought conditions, which method comprises modulating expression in a plant of a nucleic acid encoding a CLC-like polypeptide.

[0325] Concerning OsBURP-like polypeptides, or AP2/ERF polypeptides, or a TPS, TPP and TPS-TPP polypeptides performance of the methods of the invention gives plants grown under non-stress conditions or under mild drought conditions increased yield relative to control plants grown under comparable conditions. Therefore, according to the present invention, there is provided a method for increasing yield in plants grown under non-stress conditions or under mild drought conditions, which method comprises modulating expression in a plant of a nucleic acid encoding an OsBURP-like polypeptide, or an AP2/ERF polypeptide, or a TPS, TPP and TPS-TPP polypeptide.

[0326] Performance of the methods of the invention gives plants grown under conditions of nutrient deficiency, particularly under conditions of nitrogen deficiency, increased yield relative to control plants grown under comparable conditions. Therefore, according to the present invention, there is provided a method for increasing yield in plants grown under conditions of nutrient deficiency, which method comprises modulating expression in a plant of a nucleic acid encoding a CLC-like polypeptide, or an OsBURP-like polypeptide, or an AP2/ERF polypeptide, or a TPS, TPP and TPS-TPP polypeptide.

[0327] Performance of the methods of the invention gives plants grown under conditions of salt stress, increased yield relative to control plants grown under comparable conditions. Therefore, according to the present invention, there is provided a method for increasing yield in plants grown under conditions of salt stress, which method comprises modulating expression in a plant of a nucleic acid encoding a CLC-like polypeptide, or an OsBURP-like polypeptide, or an AP2/ERF polypeptide, or an TPS, TPP and TPS-TPP polypeptide.

[0328] The invention also provides genetic constructs and vectors to facilitate introduction and/or expression in plants of nucleic acids encoding CLC-like polypeptides, or OsBURP-like polypeptides, or AP2/ERF polypeptides, or TPS, TPP and TPS-TPP polypeptides. The gene constructs may be inserted into vectors, which may be commercially available, suitable for transforming into plants and suitable for expression of the gene of interest in the transformed cells. The invention also provides use of a gene construct as defined herein in the methods of the invention.

[0329] More specifically, the present invention provides a construct comprising:
[0330] (a) a nucleic acid encoding a CLC-like polypeptide, or an OsBURP-like polypeptide, or an AP2/ERF polypeptide, or a TPS, TPP and TPS-TPP polypeptide as defined above;
[0331] (b) one or more control sequences capable of driving expression of the nucleic acid sequence of (a); and optionally
[0332] (c) a transcription termination sequence.

[0333] Preferably, the nucleic acid encoding a CLC-like polypeptide, or an OsBURP-like polypeptide, or an AP2/ERF polypeptide, or a TPS, TPP and TPS-TPP polypeptide is as defined above. The term “control sequence” and “termination sequence” are as defined herein.

[0334] Plants are transformed with a vector comprising any of the nucleic acids described above. The skilled artisan is well aware of the genetic elements that must be present on the vector in order to successfully transform, select and propagate host cells containing the sequence of interest. The sequence of interest is operably linked to one or more control sequences (at least to a promoter).

[0335] Concerning CLC-like polypeptides, or OsBURP-like polypeptides, or AP2/ERF polypeptides, advantageously, any type of promoter, whether natural or synthetic, may be used to drive expression of the nucleic acid sequence, but preferably the promoter is of plant origin. A constitutive promoter is particularly useful in the methods. Preferably the constitutive promoter is a ubiquitous constitutive promoter of medium strength. See the “Definitions” section herein for definitions of the various promoter types.

[0336] Concerning advantageously, any type of promoter, whether natural or synthetic, may be used to drive expression of the nucleic acid sequence, but preferably the promoter is of plant origin. A constitutive promoter is particularly useful in the methods. Preferably the constitutive promoter is a ubiquitous constitutive promoter of medium strength. See the “Definitions” section herein for definitions of the various promoter types. Also useful in the methods of the invention is a flower or a meristem specific promoter.

[0337] Concerning CLC-like polypeptides, it should be clear that the applicability of the present invention is not restricted to the CLC-like polypeptide-encoding nucleic acid represented by SEQ ID NO: 1, nor is the applicability of the invention restricted to expression of a CLC-like polypeptide-encoding nucleic acid when driven by a constitutive promoter.

[0338] The constitutive promoter is preferably a medium strength promoter, more preferably selected from a plant derived promoter, such as a GOS2 promoter, more preferably is the promoter GOS2 promoter from rice. Further preferably the constitutive promoter is represented by a nucleic acid sequence substantially similar to SEQ ID NO: 91, most preferably the constitutive promoter is as represented by SEQ ID NO: 91. See the “Definitions” section herein for further examples of constitutive promoters.

[0339] Optionally, one or more terminator sequences may be used in the construct introduced into a plant. Preferably, the construct comprises an expression cassette comprising a GOS2 promoter, substantially similar to SEQ ID NO: 91, and the nucleic acid encoding the CLC-like polypeptide.

[0340] Concerning osBURP-like polypeptides, it should be clear that the applicability of the present invention is not restricted to the OsBURP-like polypeptide-encoding nucleic acid represented by SEQ ID NO: 94, nor is the applicability of the invention restricted to expression of an OsBURP-like polypeptide-encoding nucleic acid when driven by a constitutive promoter.

[0341] The constitutive promoter is preferably a medium strength promoter, more preferably selected from a plant derived promoter, such as a GOS2 promoter, more preferably is the promoter GOS2 promoter from rice. Further preferably the constitutive promoter is represented by a nucleic acid sequence substantially similar to SEQ ID NO: 156, most preferably the constitutive promoter is as represented by SEQ ID NO: 156. See the “Definitions” section herein for further examples of constitutive promoters.

[0342] Optionally, one or more terminator sequences may be used in the construct introduced into a plant. Preferably, the construct comprises an expression cassette comprising a GOS2 promoter, substantially similar to SEQ ID NO: 156, and the nucleic acid encoding the OsBURP-like polypeptide. Furthermore, one or more sequences encoding selectable markers may be present on the construct introduced into a plant.

[0343] Concerning AP2/ERf polypeptides, it should be clear that the applicability of the present invention is not restricted to the AP2/ERF polypeptide-encoding nucleic acid represented by SEQ ID NO: 159, nor is the applicability of the invention restricted to expression of a AP2/ERF polypeptide-encoding nucleic acid when driven by a constitutive promoter.

[0344] The constitutive promoter is preferably a medium strength promoter, more preferably selected from a plant derived promoter, such as a GOS2 promoter, more preferably is the promoter GOS2 promoter from rice. Further preferably the constitutive promoter is represented by a nucleic acid sequence substantially similar to SEQ ID NO: 269, most preferably the constitutive promoter is as represented by SEQ ID NO: 269. See the “Definitions” section herein for further examples of constitutive promoters.

[0345] Optionally, one or more terminator sequences may be used in the construct introduced into a plant. Preferably, the construct comprises an expression cassette comprising a GOS2 promoter, substantially similar to SEQ ID NO: 269, and the nucleic acid encoding the AP2/ERF polypeptide.

[0346] Concerning TPS-TPP-like polypeptides, it should be clear that the applicability of the present invention is not restricted to the TPS, TPP, and TPS-TPP polypeptide-encoding nucleic acid represented by the sequences used to transformed rice according to the Examples section, nor is the applicability of the invention restricted to expression of a TPS, TPP, and TPS-TPP polypeptide-encoding nucleic acid when driven by a constitutive promoter, or when driven by a flower or a meristem specific promoter.

[0347] The constitutive promoter is preferably a medium strength promoter, more preferably selected from a plant derived promoter, such as a GOS2 promoter, more preferably is the promoter GOS2 promoter from rice. Further preferably the constitutive promoter is represented by a nucleic acid sequence substantially similar to SEQ ID NO: 457, most preferably the constitutive promoter is as represented by SEQ ID NO: 457. See the “Definitions” section herein for further examples of constitutive promoters.

[0348] Examples of flower and meristem promoters are given in table 2 of the definitions section.

[0349] According to a preferred feature of the invention, the modulated expression is increased expression. Methods for increasing expression of nucleic acids or genes, or gene products, are well documented in the art and examples are provided in the definitions section.

[0350] As mentioned above, a preferred method for modulating expression of a nucleic acid encoding a CLC-like polypeptide, or an OsBURP-like polypeptide, or an AP2/ERF polypeptide, or a TPS, TPP and TPS-TPP polypeptide is by introducing and expressing in a plant a nucleic acid encoding a CLC-like polypeptide, or an OsBURP-like polypeptide, or an AP2/ERF polypeptide, or a TPS, TPP and TPS-TPP polypeptide; however the effects of performing the method, i.e. enhancing yield-related traits may also be achieved using other well known techniques, including but not limited to T-DNA activation tagging, TILLING, homologous recombination. A description of these techniques is provided in the definitions section.

[0351] The invention also provides a method for the production of transgenic plants having enhanced yield-related traits relative to control plants, comprising introduction and expression in a plant of any nucleic acid encoding a CLC-like polypeptide, or an OsBURP-like polypeptide, or an AP2/ERF polypeptide, or a TPS, TPP and TPS-TPP polypeptide as defined hereinabove.

[0352] Concerning CLC-like polypeptides, or OsBURP-like polypeptides, or AP2/ERF polypeptides, the present invention, more specifically provides a method for the production of transgenic plants having enhanced yield-related traits, particularly increased (seed) yield, which method comprises:
[0353] (i) introducing and expressing in a plant or plant cell respectively a CLC-like polypeptide, or an OsBURP-like polypeptide, or an AP2/ERF polypeptide—encoding nucleic acid; and
[0354] (ii) cultivating the plant cell under conditions promoting plant growth and development.

[0355] The nucleic acid of (i) may be any of the nucleic acids capable of encoding a CLC-like polypeptide, or a OsBURP-like polypeptide, or a AP2/ERF polypeptide as defined herein.

[0356] Concerning TPS-TPP-like polypeptides, more specifically, the present invention provides a method for the production of transgenic plants having enhanced yield-related traits, particularly having any one or more of increased size or number of floral meristems, increased number of flowers, increased number of seeds, increased yield, preferably increased biomass and/or increased seed weight relative to control plants, which method comprises:
[0357] (i) a nucleic acid encoding a TPS-TPP protein fusion; or
[0358] (ii) a first nucleic acid encoding a TPS polypeptide or an active portion thereof, and a second nucleic acid encoding a TPP polypeptide or an active portion thereof, wherein the first and second nucleic acids are comprised in a single or in multiple, at least two, nucleic acid molecules; or
[0359] (iii) said one or more nucleic acids of (i) and (ii) further comprising a sequence encoding a chloroplast targeting signal; and
[0360] (iv) cultivating the plant cell under conditions promoting plant growth and development.

[0361] The nucleic acid of (i) to (iii) may be any of the nucleic acids capable of encoding a TPS, TPP or a TPS-TPP polypeptide as defined herein.

[0362] The nucleic acid may be introduced directly into a plant cell or into the plant itself (including introduction into a tissue, organ or any other part of a plant). According to a preferred feature of the present invention, the nucleic acid is preferably introduced into a plant by transformation. The term “transformation” is described in more detail in the “definitions” section herein.

[0363] The present invention clearly extends to any plant cell or plant produced by any of the methods described herein, and to all plant parts and propagules thereof. The present invention encompasses plants or parts thereof (including seeds) obtainable by the methods according to the present invention. The plants or parts thereof comprise a nucleic acid transgene encoding a CLC-like polypeptide, or an OsBURP-like polypeptide, or an AP2/ERF polypeptide, or a TPS, TPP and TPS-TPP polypeptide, as defined above. The present invention extends further to encompass the progeny of a primary transformed or transfected cell, tissue, organ or whole plant that has been produced by any of the aforementioned methods, the only requirement being that progeny exhibit the same genotypic and/or phenotypic characteristic(s) as those produced by the parent in the methods according to the invention.

[0364] The invention also includes host cells containing an isolated nucleic acid encoding a CLC-like polypeptide, or an OsBURP-like polypeptide, or an AP2/ERF polypeptide, or a TPS, TPP and TPS-TPP polypeptide as defined hereinabove. Preferred host cells according to the invention are plant cells. Host plants for the nucleic acids or the vector used in the method according to the invention, the expression cassette or construct or vector are, in principle, advantageously all plants, which are capable of synthesizing the polypeptides used in the inventive method.

[0365] The methods of the invention are advantageously applicable to any plant. Plants that are particularly useful in the methods of the invention include all plants which belong to the superfamily Viridiplantae, in particular monocotyledonous and dicotyledonous plants including fodder or forage legumes, ornamental plants, food crops, trees or shrubs. According to a preferred embodiment of the present invention, the plant is a crop plant. Examples of crop plants include soybean, sunflower, canola, alfalfa, rapeseed, linseed, cotton, tomato, potato and tobacco. Further preferably, the plant is a monocotyledonous plant. Examples of monocotyledonous plants include sugarcane. More preferably the plant is a cereal. Examples of cereals include rice, maize, wheat, barley, millet, rye, triticale, sorghum, emmer, spelt, secale, einkorn, teff, milo and oats.

[0366] The invention also extends to harvestable parts of a plant such as, but not limited to seeds, leaves, fruits, flowers, stems, roots, rhizomes, tubers and bulbs, which harvestable parts comprise a recombinant nucleic acid encoding a CLC-like polypeptide, or an OsBURP-like polypeptide, or an AP2/ERF polypeptide, or a TPS, TPP and TPS-TPP polypeptide. The invention furthermore relates to products derived, preferably directly derived, from a harvestable part of such a plant, such as dry pellets or powders, oil, fat and fatty acids, starch or proteins.

[0367] The present invention also encompasses use of nucleic acids encoding CLC-like polypeptides or OsBURP-like polypeptides, or AP2/ERF polypeptides, or TPS, TPP or TPS-TPP polypeptides, as described herein and use of these CLC-like polypeptides, or OsBURP-like polypeptides, or AP2/ERF polypeptides, or TPS, TPP or TPS-TPP polypeptides, in enhancing any of the aforementioned yield-related traits in plants. For example, nucleic acids encoding CLC-like polypeptides, or OsBURP-like polypeptides, or AP2/ERF polypeptides, or TPS, TPP and TPS-TPP polypeptides, described herein, or the CLC-like polypeptides, or OsBURP-like polypeptides, or AP2/ERF polypeptides, or TPS, TPP and TPS-TPP polypeptides, themselves, may find use in breeding programmes in which a DNA marker is identified which may be genetically linked to a CLC-like polypeptide, or an OsBURP-like polypeptide, or an AP2/ERF polypeptide, or a TPS, TPP and TPS-TPP polypeptide-encoding gene. The nucleic acids/genes, or the CLC-like polypeptides, or OsBURP-like polypeptides, or AP2/ERF polypeptides, or TPS, TPP and TPS-TPP polypeptides, themselves may be used to define a molecular marker. This DNA or protein marker may then be used in breeding programmes to select plants having enhanced yield-related traits as defined hereinabove in the methods of the invention. Furthermore, allelic variants of a CLC-like polypeptide, or an OsBURP-like polypeptide, or an AP2/ERF polypeptide, or a TPS, TPP and TPS-TPP polypeptide-encoding nucleic acid/gene may find use in marker-assisted breeding programmes. Nucleic acids encoding CLC-like polypeptides, or OsBURP-like polypeptides, or AP2/ERF polypeptides, or TPS, TPP and TPS-TPP polypeptides, may also be used as probes for genetically and physically mapping the genes that they are a part of, and as markers for traits linked to those genes. Such information may be useful in plant breeding in order to develop lines with desired phenotypes.

### Items

[0368] The invention is characterised by one or more of the following items.

### CLC-Like Polypeptide

[0369] 1. A method for enhancing yield-related traits in plants relative to control plants, comprising modulating expression in a plant of a nucleic acid encoding a CLC-like polypeptide, wherein said CLC-like polypeptide comprises a Voltage_CLC domain (Pfam entry PF00654) and C-terminally thereof a CBS domain (Pfam entry PF00571).
[0370] 2. Method according to item 1, wherein said CLC-like polypeptide comprises one or more of the motifs 1 to 8 (SEQ ID NO: 83 to SEQ ID NO: 90) or one or more of the motifs as represented by SEQ IN NO: 492 to SEQ ID NO: 503.
[0371] 3. Method according to item 1 or 2, wherein said modulated expression is effected by introducing and expressing in a plant a nucleic acid encoding a CLC-like polypeptide.
[0372] 4. Method according to any one of items 1 to 3, wherein said nucleic acid encoding a CLC-like polypeptide encodes any one of the proteins listed in Table A1 or is a portion of such a nucleic acid, or a nucleic acid capable of hybridising with such a nucleic acid.
[0373] 5. Method according to any one of items 1 to 4, wherein said nucleic acid sequence encodes an orthologue or paralogue of any of the proteins given in Table A1.
[0374] 6. Method according to any preceding items 1 to 5, wherein said enhanced yield-related traits comprise increased yield, preferably increased biomass and/or increased seed yield relative to control plants.
[0375] 7. Method according to any one of items 1 to 6, wherein said enhanced yield-related traits are obtained under conditions of drought stress, or salt stress.
[0376] 8. Method according to any one of items 3 to 7, wherein said nucleic acid is operably linked to a constitutive promoter, preferably to a GOS2 promoter, most preferably to a GOS2 promoter from rice.
[0377] 9. Method according to any one of items 1 to 8, wherein said nucleic acid encoding a CLC-like polypeptide is of plant origin, preferably from a dicotyledonous plant, further preferably from the family Poaceae, more preferably from the genus Oryza, most preferably from Oryza sativa.
[0378] 10. Plant or part thereof, including seeds, obtainable by a method according to any one of items 1 to 9, wherein said plant or part thereof comprises a recombinant nucleic acid encoding a CLC-like polypeptide.
[0379] 11. Construct comprising:
   [0380] (i) nucleic acid encoding a CLC-like polypeptide as defined in items 1 or 2;
   [0381] (ii) one or more control sequences capable of driving expression of the nucleic acid sequence of (i); and optionally
   [0382] (iii) a transcription termination sequence.
[0383] 12. Construct according to item 11, wherein one of said control sequences is a constitutive promoter, preferably a GOS2 promoter, most preferably a GOS2 promoter from rice.
[0384] 13. Use of a construct according to item 11 or 12 in a method for making plants having increased yield, particularly increased biomass and/or increased seed yield relative to control plants.
[0385] 14. Plant, plant part or plant cell transformed with a construct according to item 11 or 12.
[0386] 15. Method for the production of a transgenic plant having increased yield, particularly increased biomass and/or increased seed yield relative to control plants, comprising:
   [0387] (i) introducing and expressing in a plant a nucleic acid encoding a CLC-like polypeptide as defined in item 1 or 2; and
   [0388] (ii) cultivating the plant cell under conditions promoting plant growth and development.
[0389] 16. Transgenic plant having increased yield, particularly increased biomass and/or increased seed yield, relative to control plants, resulting from modulated expression of a nucleic acid encoding a CLC-like polypeptide as defined in item 1 or 2, or a transgenic plant cell derived from said transgenic plant.
[0390] 17. Transgenic plant according to item 10, 14 or 16, or a transgenic plant cell derived thereof, wherein said plant is a crop plant or a monocot or a cereal, such as rice, maize, wheat, barley, millet, rye, triticale, sorghum emmer, spelt, secale, einkorn, teff, milo and oats.
[0391] 18. Harvestable parts of a plant according to item 17, wherein said harvestable parts are preferably shoot biomass and/or seeds.
[0392] 19. Products derived from a plant according to item 17 and/or from harvestable parts of a plant according to item 18.
[0393] 20. Use of a nucleic acid encoding a CLC-like polypeptide in increasing yield, particularly in increasing seed yield and/or shoot biomass in plants, relative to control plants.

### Os-BURP-Like Polypeptides

[0394] 21. A method for enhancing yield-related traits in plants relative to control plants, comprising modulating expression in a plant of a nucleic acid encoding an OsBURP-like polypeptide, wherein said OsBURP-like polypeptide comprises a BURP domain.
[0395] 22. Method according to item 21, wherein said OsBURP-like polypeptide comprises one or more of the following motifs:

(i) Motif 9:
(SEQ ID NO: 140)
[HE][EK][HK]YCATSLESM[VI][DE][LF][SVA][TA]S[KS]LG,
(ii) Motif 10:
(SEQ ID NO: 141)
V[VA]CH[RK][QEM][NP]Y[AP]YAVF[YG][VC]H[KGT][TIS][KE][AGT][AT],
(iii) Motif 11:
(SEQ ID NO: 142)
[AP][VK][AH][EL]A[YF][QK][RVL[KG]V[AK]PG[TKS]V[PA]VCHFLPQD[DH][VMI]
[VL]W

[0396] 23. Method according to item 21 or 22, wherein said modulated expression is effected by introducing and expressing in a plant a nucleic acid encoding a OsBURP-like polypeptide.
[0397] 24. Method according to any one of items 21 to 23, wherein said nucleic acid encoding a OsBURP-like polypeptide encodes any one of the proteins listed in Table A2 or is a portion of such a nucleic acid, or a nucleic acid capable of hybridising with such a nucleic acid.
[0398] 25. Method according to any one of items 21 to 24, wherein said nucleic acid sequence encodes an orthologue or paralogue of any of the proteins given in Table A2.
[0399] 26. Method according to any preceding items 21 to 25, wherein said enhanced yield-related traits comprise increased yield and/or early vigour, preferably increased biomass and/or increased seed yield relative to control plants.
[0400] 27. Method according to any one of items 21 to 26, wherein said enhanced yield-related traits are obtained under drought stress conditions.
[0401] 28. Method according to any one of items 21 to 26, wherein said enhanced yield-related traits are obtained under conditions of salt stress.
[0402] 29. Method according to any one of items 23 to 28, wherein said nucleic acid is operably linked to a constitutive promoter, preferably to a GOS2 promoter, most preferably to a GOS2 promoter from rice.
[0403] 30. Method according to any one of items 21 to 29, wherein said nucleic acid encoding a OsBURP-like polypeptide is of plant origin, preferably from a monocotyledonous plant, further preferably from the family Poaceae, more preferably from the genus Oryza, most preferably from Oryza sativa.
[0404] 31. Plant or part thereof, including seeds, obtainable by a method according to any one of items 21 to 30, wherein said plant or part thereof comprises a recombinant nucleic acid encoding a OsBURP-like polypeptide.
[0405] 32. Construct comprising:
   [0406] (i) nucleic acid encoding a OsBURP-like polypeptide as defined in items 21 or 22;
   [0407] (ii) one or more control sequences capable of driving expression of the nucleic acid sequence of (i); and optionally
   [0408] (iii) a transcription termination sequence.
[0409] 33. Construct according to item 32, wherein one of said control sequences is a constitutive promoter, preferably a GOS2 promoter, most preferably a GOS2 promoter from rice.
[0410] 34. Use of a construct according to item 32 or 33 in a method for making plants having increased yield, particularly increased biomass and/or increased seed yield relative to control plants.
[0411] 35. Plant, plant part or plant cell transformed with a construct according to item 32 or 33.
[0412] 36. Method for the production of a transgenic plant having increased yield, particularly increased biomass and/or increased seed yield relative to control plants, comprising:
   [0413] (i) introducing and expressing in a plant a nucleic acid encoding a OsBURP-like polypeptide as defined in item 21 or 22; and
   [0414] (ii) cultivating the plant cell under conditions promoting plant growth and development.
[0415] 37. Transgenic plant having increased yield, particularly increased biomass and/or increased seed yield, relative to control plants, resulting from modulated expression of a nucleic acid encoding a OsBURP-like polypeptide as defined in item 21 or 22, or a transgenic plant cell derived from said transgenic plant.
[0416] 38. Transgenic plant according to item 31, 35 or 37, or a transgenic plant cell derived thereof, wherein said plant is a crop plant or a monocot or a cereal, such as rice, maize, wheat, barley, millet, rye, triticale, sorghum emmer, spelt, secale, einkorn, teff, milo and oats.
[0417] 39. Harvestable parts of a plant according to item 38, wherein said harvestable parts are preferably shoot biomass and/or seeds.
[0418] 40. Products derived from a plant according to item 38 and/or from harvestable parts of a plant according to item 39.
[0419] 41. Use of a nucleic acid encoding a OsBURP-like polypeptide in increasing yield in plants, relative to control plants.
[0420] 42. Use according to item 41 wherein said increased yield in plants relative to control plants is increased seed yield and/or shoot biomass in plants, relative to control plants.

### AP2/ERF-Like Polypeptides

[0421] 43. A method for enhancing yield-related traits in plants relative to control plants, comprising modulating expression in a plant of a nucleic acid encoding a AP2/ERF polypeptide, wherein said AP2/ERF polypeptide comprises an AP2/ERF domain.
[0422] 44. Method according to item 43, wherein said AP2/ERF polypeptide comprises one or more of the following motifs:

(i)
Motif 25:
(SEQ ID NO: 265)
GXRXRXWGXWVXEIRXPXXXXRXWLGSXXXXXXAAXAXDXA,
(ii)
Motif 26:
(SEQ ID NO: 266)
IXXXA,
(iii)
Motif 27:
(SEQ ID NO: 267)
DXNXXP
(iv)
Motif 28:
(SEQ ID NO: 268)
LWXF

[0423] wherein X indicates no conservation in the respective position.
[0424] 45. Method according to items 43 or 44, wherein said AP2/ERF polypeptide comprises Motif 25 and at least Motif 26.
[0425] 46. Method according to any of items 43 to 45, wherein said AP2/ERF polypeptide comprises Motif 25, Motif 26 and Motif 27 or Motif 28.
[0426] 47. Method according to any of items 43 to 46, wherein said AP2/ERF polypeptide comprises Motif 25, Motif 26 and Motif 27.
[0427] 48. Method according to any of items 43 to 47, wherein said modulated expression is effected by introducing and expressing in a plant a nucleic acid encoding an AP2/ERF polypeptide.
[0428] 49. Method according to any of items 43 to 48, wherein said nucleic acid encoding an AP2/ERF polypeptide encodes any one of the proteins listed in Table A3 or is a portion of such a nucleic acid, or a nucleic acid capable of hybridising with such a nucleic acid.
[0429] 50. Method according to item 49, wherein said nucleic acid sequence encodes an orthologue or paralogue of any of the proteins given in Table A3.
[0430] 51. Method according to any of items 43 to 50, wherein said enhanced yield-related traits comprise increased yield, preferably increased biomass and/or increased seed yield relative to control plants.
[0431] 52. Method according to any of items 43 to 51, wherein said increased biomass relative to control plants comprises early vigour, maximum height, total root biomass and harvest index.
[0432] 53. Method according to any of items 43 to 52, wherein said increased seed yield relative to control plants comprises total seed weight, number of filled seeds and fill rate.
[0433] 54. Method according to any one of items 43 to 53, wherein said enhanced yield-related traits are obtained under drought-stress conditions.
[0434] 55. Method according to any one of items 43 to 53, wherein said enhanced yield-related traits are obtained under conditions of drought stress, salt stress or nitrogen deficiency.
[0435] 56. Method according to item 55, wherein said enhanced yield-related traits are obtained under conditions of drought stress.
[0436] 57. Method according to any of items 43 to 56, wherein said nucleic acid is operably linked to a constitutive promoter, preferably to a GOS2 promoter, most preferably to a GOS2 promoter from rice.
[0437] 58. Method according to any of items 43 to 57, wherein said nucleic acid encoding a AP2/ERF polypeptide is of plant origin, preferably from a dicotyledonous plant, further preferably from the family Fabaceae, more preferably from the genus Medicago, most preferably from M. truncatula.
[0438] 59. Plant or part thereof, including seeds, obtainable by a method according to any one of items 43 to 58, wherein said plant or part thereof comprises a recombinant nucleic acid encoding an AP2/ERF polypeptide.
[0439] 60. Construct comprising:
   [0440] (i) nucleic acid encoding a AP2/ERF polypeptide as defined in items 43 to 47;
   [0441] (ii) one or more control sequences capable of driving expression of the nucleic acid sequence of (I); and optionally
   [0442] (iii) a transcription termination sequence.
[0443] 61. Construct according to item 60, wherein one of said control sequences is a constitutive promoter, preferably a GOS2 promoter, most preferably a GOS2 promoter from rice.
[0444] 62. Use of a construct according to the item 60 or 61 in a method for making plants having increased yield, particularly increased biomass and/or increased seed yield relative to control plants.
[0445] 63. Plant, plant part or plant cell transformed with a construct according to item 60 or 61.
[0446] 64. Method for the production of a transgenic plant having increased yield, particularly increased biomass and/or increased seed yield relative to control plants, comprising:
   [0447] (i) introducing and expressing in a plant a nucleic acid encoding an AP2/ERF polypeptide as defined in item 43 to 47; and
   [0448] (ii) cultivating the plant cell under conditions promoting plant growth and development.
[0449] 65. Transgenic plant having increased yield, particularly increased biomass and/or increased seed yield, relative to control plants, resulting from modulated expression of a nucleic acid encoding an AP2/ERF polypeptide as defined in items 43 to 47 or a transgenic plant cell derived from said transgenic plant.
[0450] 66. Transgenic plant according to item 59, 63 or 65, or a transgenic plant cell derived thereof, wherein said plant is a crop plant or a monocot or a cereal, such as rice, maize, wheat, barley, millet, rye, triticale, sorghum emmer, spelt, secale, einkorn, teff, milo and oats.
[0451] 67. Harvestable parts of a plant according to item 66, wherein said harvestable parts are preferably shoot biomass and/or seeds.
[0452] 68. Products derived from a plant according to item 66 and/or from harvestable parts of a plant according to item 67.
[0453] 69. Use of a nucleic acid encoding an AP2/ERF polypeptide in increasing yield, particularly in increasing seed yield and/or shoot biomass in plants, relative to control plants.

### TPS, TPP and TPS-TPP Polypeptide

[0454] 70. A method for enhancing yield-related traits in plants relative to control plants, comprising modulating expression in a plant of:
   [0455] (i) a nucleic acid encoding a TPS-TPP protein fusion: fusion between a TPS polypeptide or an active portion thereof and a TPP polypeptide or an active portion thereof; or
   [0456] (ii) a first nucleic acid encoding a TPS polypeptide or an active portion thereof, and a second nucleic acid encoding a TPP polypeptide or an active portion thereof, wherein the first and second nucleic acids are comprised in a single or in multiple, at least two, nucleic acid molecules.
[0457] 71. A method according to item 70 wherein
   [0458] (i) the TPS polypeptide or active portion thereof has in increasing order of preference at least 25%, 26%, 27%, 28%, 29%, 30%, 31%, 32%, 33%, 34%, 35%, 36%, 37%, 38%, 39%, 40%, 41%, 42%, 43%, 44%, 45%, 46%, 47%, 48%, 49%, 50%, 51%, 52%, 53%, 54%, 55%, 56%, 57%, 58%, 59%, 60%, 61%, 62%, 63%, 64%, 65%, 66%, 67%, 68%, 69%, 70%, 71%, 72%, 73%, 74%, 75%, 76%, 77%, 78%, 79%, 80%, 81%, 82%, 83%, 84%, 85%, 86%, 87%, 88%, 89%, 90%, 91%, 92%, 93%, 94%, 95%, 96%, 97%, 98%, 99% or 100% overall sequence identity to the amino acid represented by any one of the polypeptide sequences of Table A4 or an active portion thereof, more preferably by SEQ ID NO: 273 or an active portion thereof or SEQ ID NO: 275 or an active portion thereof;
   [0459] (ii) the TPP polypeptide or an active portion thereof has in increasing order of preference at least 25%, 26%, 27%, 28%, 29%, 30%, 31%, 32%, 33%, 34%, 35%, 36%, 37%, 38%, 39%, 40%, 41%, 42%, 43%, 44%, 45%, 46%, 47%, 48%, 49%, 50%, 51%, 52%, 53%, 54%, 55%, 56%, 57%, 58%, 59%, 60%, 61%, 62%, 63%, 64%, 65%, 66%, 67%, 68%, 69%, 70%, 71%, 72%, 73%, 74%, 75%, 76%, 77%, 78%, 79%, 80%, 81%, 82%, 83%, 84%, 85%, 86%, 87%, 88%, 89%, 90%, 91%, 92%, 93%, 94%, 95%, 96%, 97%, 98%, 99% or 100% overall sequence identity to the amino acid represented by any one of the polypeptide sequences of Table A5 or an active portion thereof, more preferably by SEQ ID NO: 299 or an active portion thereof or SEQ ID NO: 301 or an active portion thereof.
[0460] 72. Method according to items 70 or 71, wherein said modulated expression is effected by introducing and expressing in a plant:
   [0461] (i) a nucleic acid encoding a TPS-TPP protein fusion, preferably having in increasing order of preference at least 25%, 26%, 27%, 28%, 29%, 30%, 31%, 32%, 33%, 34%, 35%, 36%, 37%, 38%, 39%, 40%, 41%, 42%, 43%, 44%, 45%, 46%, 47%, 48%, 49%, 50%, 51%, 52%, 53%, 54%, 55%, 56%, 57%, 58%, 59%, 60%, 61%, 62%, 63%, 64%, 65%, 66%, 67%, 68%, 69%, 70%, 71%, 72%, 73%, 74%, 75%, 76%, 77%, 78%, 79%, 80%, 81%, 82%, 83%, 84%, 85%, 86%, 87%, 88%, 89%, 90%, 91%, 92%, 93%, 94%, 95%, 96%, 97%, 98%, 99% or 100% overall sequence identity to the amino acid represented by any one of the polypeptide sequences of Table A6 or an active portion thereof, more preferably by SEQ ID NO: 440 or an active portion thereof, or SEQ ID NO: 442 or an active portion thereof, or SEQ ID NO: 444 or an active portion thereof; or
   [0462] (ii) a first nucleic acid encoding a TPS polypeptide or an active portion thereof, and a second nucleic acid encoding a TPP polypeptide or an active portion thereof, wherein the first and second nucleic acids are comprised in a single or in multiple, at least two, nucleic acid molecules.
[0463] 73. Method according to items 70 to 72 wherein said one or more nucleic acids are expressed in the chloroplast of a plant cell, plant or plant part thereof and preferably comprise a sequence encoding a chloroplast targeting signal, further preferably said sequence is located at the 5′ terminus of the coding region, even more preferably encodes any one of the polypeptide chloroplast targeting signals of Table 3, most preferably encodes SEQ ID NO: 456 or a portion thereof.
[0464] 74. Method according to any of items 70 to 73, wherein said enhanced yield-related traits comprise any one or more of increased size or number of floral meristems, increased number of flowers, increased number of seeds, increased yield, preferably increased biomass and/or increased seed weight relative to control plants.
[0465] 75. Method according to any of items 70 to 74, wherein said enhanced yield-related traits are obtained under plant cell, plant culturing conditions where nitrogen would be limiting for growth for the control plant cell, plant or a part thereof.
[0466] 76. Method according to any of items 70 to 75, wherein said enhanced yield-related traits are obtained under non-stress conditions or under stress conditions selected from any one or more of drought, salt and cold stress.
[0467] 77. Method according to any one of items 72 to 76, wherein said one or more said nucleic acids are operably linked to a plant promoter, preferably to a constitutive promoter, more preferably to a GOS2 promoter, most preferably to a GOS2 promoter from rice.
[0468] 78. Method according to any of items 70 to 76, wherein said one or more said nucleic acids is of plant origin preferably from a dicotyledonous plant, further preferably from the family Brassicaceae, more preferably from the genus Arabidopsis, most preferably from Arabidopsis thaliana or of bacterial origin preferably from Saccharomyces more preferably from Saccharomyces cerevisie.
[0469] 79. Plant or part thereof, including seeds, obtainable by a method according to any any of items 70 to 75, wherein said plant or part thereof comprises:
   [0470] (i) a nucleic acid encoding a TPS-TPP protein fusion; or
   [0471] (ii) a first nucleic acid encoding a TPS polypeptide or an active portion thereof, and a second nucleic acid encoding a TPP polypeptide or an active portion thereof, wherein the first and second nucleic acids are comprised in a single or in multiple, at least two, nucleic acid molecules; or
   [0472] (iii) said one or more nucleic acids of (i) and (ii) further comprising a sequence encoding a chloroplast targeting signal.
[0473] 80. Construct comprising:
   [0474] (i) a nucleic acid encoding a TPS-TPP protein fusion; or
   [0475] (ii) a first nucleic acid encoding a TPS polypeptide or an active portion thereof, and a second nucleic acid encoding a TPP polypeptide or an active portion thereof, wherein the first and second nucleic acids are comprised in a single or in multiple, at least two, nucleic acid molecules; or
   [0476] (iii) said one or more nucleic acids of (i) and (ii) further comprising a sequence encoding a chloroplast targeting signal; and
   [0477] (iv) one or more control sequences capable of driving expression of the nucleic acid sequence of (i), (ii) and (iii), preferably a plant promoter, more preferably a constitutive promoter, even more preferably a GOS2 promoter, most preferably a GOS2 promoter from rice; and optionally
   [0478] (v) a transcription termination sequence.
[0479] 81. Use of a construct according to item 80 in a method for making plants having any one or more of increased size or number of floral meristems, increased number of flowers, increased number of seeds, increased yield, preferably increased biomass and/or increased seed weight relative to control plants.
[0480] 82. Plant, plant part or plant cell transformed with a construct according to item 80.
[0481] 83. Method for the production of a transgenic plant having any one or more of increased size or number of floral meristems, increased number of flowers, increased number of seeds, increased yield, preferably increased biomass and/or increased seed weight relative to control plants, comprising:
   [0482] (i) a nucleic acid encoding a TPS-TPP protein fusion; or
   [0483] (ii) a first nucleic acid encoding a TPS polypeptide or an active portion thereof, and a second nucleic acid encoding a TPP polypeptide or an active portion thereof, wherein the first and second nucleic acids are comprised in a single or in multiple, at least two, nucleic acid molecules; or
   [0484] (iii) said one or more nucleic acids of (i) and (ii) further comprising a sequence encoding a chloroplast targeting signal; and
   [0485] (iv) cultivating the plant cell under conditions promoting plant growth and development.
[0486] 84. Transgenic plant having any one or more of increased size or number of floral meristems, increased number of flowers, increased number of seeds, increased yield, preferably increased biomass and/or increased seed weight relative to control plants, resulting from modulated expression of a first nucleic acid encoding:
   [0487] (i) a nucleic acid encoding a TPS-TPP protein fusion; or
   [0488] (ii) a first nucleic acid encoding a TPS polypeptide or an active portion thereof, and a second nucleic acid encoding a TPP polypeptide or an active portion thereof, wherein the first and second nucleic acids are comprised in a single or in multiple, at least two, nucleic acid molecules; or
   [0489] (iii) said one or more nucleic acids of (i) and (ii) further comprising a sequence encoding a chloroplast targeting signal; or a transgenic plant cell derived from said transgenic plant.
[0490] 85. Transgenic plant according to item 79, 82 or 84, or a transgenic plant part or cell derived thereof, wherein said plant is a crop plant or a monocot or a cereal, such as rice, maize, wheat, barley, millet, rye, triticale, sorghum emmer, spelt, secale, einkorn, teff, milo and oats.
[0491] 86. Harvestable parts of a plant according to item 85, wherein said harvestable parts are preferably shoot biomass and/or seeds.
[0492] 87. Products derived from a plant according to item 84 or 85 and/or from harvestable parts of a plant according to item 86.
[0493] 88. Use of any one, two or more nucleic acids according to item 70 to 73 in increasing yield, particularly in increasing seed yield and/or shoot biomass in plants, relative to control plants.

### DESCRIPTION OF FIGURES

[0494] The present invention will now be described with reference to the following figures in which:

[0495] FIG. 1 represents the domain structure of SEQ ID NO: 2 with the Voltage_CLC domain (PF00654) shown in bold and the CBS domain (PF00571) in bold italics. The conserved motifs 1 to 8 are underlined and numbered.

[0496] FIG. 2 represents a multiple alignment of various CLC-like polypeptides. The asterisks indicate identical amino acids among the various protein sequences, colons represent highly conserved amino acid substitutions, and the dots represent less conserved amino acid substitution; on other positions there is no sequence conservation. These alignments can be used for defining further motifs, when using conserved amino acids.

[0497] FIG. 3 shows phylogenetic tree of CLC-like polypeptides, SEQ ID NO: 2 is represented as O_sativa_TC285852

[0498] FIG. 4 represents the binary vector used for increased expression in Oryza sativa of a CLC-like-encoding nucleic acid under the control of a rice GOS2 promoter (pGOS2)

[0499] FIG. 5 represents the domain structure of SEQ ID NO: 95 with conserved motifs 9 to 24 and the BURP domain shown in bold. The cleavage site of the N-terminal secretion signal is underlined (SHAASP).

[0500] FIG. 6 represents a multiple alignment of various OsBURP-like polypeptides. The asterisks indicate identical amino acids among the various protein sequences, colons represent highly conserved amino acid substitutions, and the dots represent less conserved amino acid substitution; on other positions there is no sequence conservation. These alignments can be used for defining further motifs, when using conserved amino acids.

[0501] FIG. 7 shows phylogenetic tree of OsBURP-like polypeptides. Small boxes frame the clades identified in context with the present invention (1=clade A1, which corresponds to BURP V according to Ding et al 2009 and contain only Oryza sativa OsBURP-like polypeptides; 2=clade B, which corresponds to RD-22-like according to Ding et al 2009, 3=clade A1, which are not rice OsBURP-like polypeptides but closely relate to clade A1, 4=clade C, not characterized before.

[0502] FIG. 8 represents the binary vector used for increased expression in Oryza sativa of a OsBURP-like-encoding nucleic acid under the control of a rice GOS2 promoter (pGOS2)

[0503] FIG. 9 represents the domain definition of AP2/ERF genes.

[0504] FIG. 10 represents a multiple alignment of various AP2/ERF polypeptides belonging to class IIa. The asterisks indicate identical amino acids among the various protein sequences, colons represent highly conserved amino acid substitutions, and the dots represent less conserved amino acid substitution; on other positions there is no sequence conservation. These alignments can be used for defining further motifs, when using conserved amino acids.

[0505] FIG. 11 shows phylogenetic tree of AP2/ERF polypeptides of class IIa.

[0506] FIG. 12 represents the binary vector used for increased expression in Oryza sativa of an AP2/ERF-encoding nucleic acid under the control of a rice GOS2 promoter (pGOS2)

[0507] FIG. 13 Distribution of the TPS (homologous to OtsA) and TPP (homologous to OtsB) domains within the different trehalose biosynthesis genes. E. coli OtsA and OtsB; Saccharomycescerevisiae (S.c.) TPS1 and TPS2, Selaginella lepidophylla (SI) TPS1, Arabidopsis thaliana (A.t.) Class I: TPS1-4, A. thaliana TPP Class II:TPS5-11 and A. thaliana TPPA-B classes. Figure reproduced from FIG. 1 of Leyman et al. 2001 TRENDS in Plant Science 6 vol. 11, 510-513.

[0508] FIG. 14 Phylogenetic tree of TPS and TPP genes of Arabidopsis thaliana (a) and S. cerevisie (b) origin. Figure reproduced from FIG. 2 of Leyman et al. 2001 TRENDS in Plant Science 6 vol. 11, 510-513.

[0509] FIG. 15 Vector indicating 3 different possible Gene-fusions of Interest. There are 3 gene fusions described in the examples in 3 vectors: pGOS2:: A.thaliana_DNTPSI-TPPB; pGOS2::S.cerevisiae_TPS1/TPS2_fusion; pS.cerevisiae_TPS1/TPS2_fusion.

### EXAMPLES

[0510] The present invention will now be described with reference to the following examples, which are by way of illustration alone. The following examples are not intended to completely define or otherwise limit the scope of the invention.

[0511] DNA manipulation: unless otherwise stated, recombinant DNA techniques are performed according to standard protocols described in (Sambrook (2001) Molecular Cloning: a laboratory manual, 3rd Edition Cold Spring Harbor Laboratory Press, CSH, New York) or in Volumes 1 and 2 of Ausubel et al. (1994), Current Protocols in Molecular Biology, Current Protocols. Standard materials and methods for plant molecular work are described in Plant Molecular Biology Labfax (1993) by R. D. D. Croy, published by BIOS Scientific Publications Ltd (UK) and Blackwell Scientific Publications (UK).

### Example 1

### Identification of Sequences Related to the Nucleic Acid Sequence Used in the methods of intervention

### 1.1 CLC-Like Polypeptides

[0512] Sequences (full length cDNA, ESTs or genomic) related to SEQ ID NO: 1 and SEQ ID NO: 2 were identified amongst those maintained in the Entrez Nucleotides database at the National Center for Biotechnology Information (NCBI) using database sequence search tools, such as the Basic Local Alignment Tool (BLAST) (Altschul et al. (1990) J. Mol. Biol. 215:403-410; and Altschul et al. (1997) Nucleic Acids Res. 25:3389-3402). The program is used to find regions of local similarity between sequences by comparing nucleic acid or polypeptide sequences to sequence databases and by calculating the statistical significance of matches. For example, the polypeptide encoded by the nucleic acid of SEQ ID NO: 1 was used for the TBLASTN algorithm, with default settings and the filter to ignore low complexity sequences set off. The output of the analysis was viewed by pairwise comparison, and ranked according to the probability score (E-value), where the score reflect the probability that a particular alignment occurs by chance (the lower the E-value, the more significant the hit). In addition to E-values, comparisons were also scored by percentage identity. Percentage identity refers to the number of identical nucleotides (or amino acids) between the two compared nucleic acid (or polypeptide) sequences over a particular length. In some instances, the default parameters may be adjusted to modify the stringency of the search. For example the E-value may be increased to show less stringent matches. This way, short nearly exact matches may be identified.

[0513] Table A1 provides a list of nucleic acid sequences related to SEQ ID NO: 1 and SEQ ID NO: 2.

TABLE A1
Examples of CLC-like nucleic acids and polypeptides:

| | Nucleic | |
|---|---|---|
| | acid | Protein |
| | SEQ | SEQ |
| Plant Source | ID NO: | ID NO: |
| >O_sativa_TC285852 | 1 | 2 |
| >A_thaliana_AT3G27170_1 | 3 | 4 |
| >A_thaliana_AT5G26240_1 | 5 | 6 |
| >A_thaliana_AT5G33280_1 | 7 | 8 |
| >A_thaliana_AT5g40890_1 | 9 | 10 |
| >A_thaliana_AT5G49890_1 | 11 | 12 |
| >G_max_Glyma01g44950_1 | 13 | 14 |
| >G_max_Glyma05g14760_1 | 15 | 16 |
| >G_max_Glyma11g00690_1 | 17 | 18 |
| >G_max_Glyma13g23080_1 | 19 | 20 |
| >G_max_Glyma16g06190_1 | 21 | 22 |
| >G_max_Glyma19g25680_1 | 23 | 24 |
| >G_max_Glyma19g25680_2 | 25 | 26 |
| >G_max_TC286373 | 27 | 28 |
| >M_truncatula_AC147497_49_5 | 29 | 30 |
| >M_truncatula_NP7258079 | 31 | 32 |
| >M_truncatula_TC137578 | 33 | 34 |
| >O_sativa_AK066027 | 35 | 36 |
| >O_sativa_LOC_Os01g65500_1 | 37 | 38 |
| >O_sativa_LOC_Os02g35190_1 | 39 | 40 |
| >O_sativa_LOC_Os03g48940_1 | 41 | 42 |
| >O_sativa_LOC_Os03g48940_2 | 43 | 44 |
| >O_sativa_LOC_Os04g36560_1 | 45 | 46 |
| >O_sativa_LOC_Os04g55210_1 | 47 | 48 |
| >O_sativa_LOC_Os08g20570_1 | 49 | 50 |
| >O_sativa_LOC_Os08g20570_2 | 51 | 52 |
| >O_sativa_TC286403 | 53 | 54 |
| >O_sativa_TC299772 | 55 | 56 |
| >O_sativa_TC300750 | 57 | 58 |
| >O_sativa_TC300965 | 59 | 60 |
| >O_sativa_TC315324 | 61 | 62 |
| >P_patens_105025 | 63 | 64 |
| >P_patens_151168 | 65 | 66 |
| >P_trichocarpa_810626 | 67 | 68 |
| >P_trichocarpa_811492 | 69 | 70 |
| >P_trichocarpa_829777 | 71 | 72 |
| >P_trichocarpa_837368 | 73 | 74 |
| >P_trichocarpa_scaff_150_21 | 75 | 76 |
| >P_trichocarpa_scaff_152_78 | 77 | 78 |
| >P_trichocarpa_scaff_86_63 | 79 | 80 |
| >Z_mays_ZM07MC27833_BFb0208A07@27749 | 81 | 82 |

[0514] Sequences have been tentatively assembled and publicly disclosed by research institutions, such as The Institute for Genomic Research (TIGR; beginning with TA). The Eukaryotic Gene Orthologs (EGO) database may be used to identify such related sequences, either by keyword search or by using the BLAST algorithm with the nucleic acid sequence or polypeptide sequence of interest. Special nucleic acid sequence databases have been created for particular organisms, such as by the Joint Genome Institute. Furthermore, access to proprietary databases, has allowed the identification of novel nucleic acid and polypeptide sequences.

### 1.2 OsBURP-Like Polypeptides

[0515] Sequences (full length cDNA, ESTs or genomic) related to SEQ ID NO: 94 and SEQ ID NO: 95 were identified amongst those maintained in the Entrez Nucleotides database at the National Center for Biotechnology Information (NCBI) using database sequence search tools, such as the Basic Local Alignment Tool (BLAST) (Altschul et al. (1990) J. Mol. Biol. 215:403-410; and Altschul et al. (1997) Nucleic Acids Res. 25:3389-3402). The program is used to find regions of local similarity between sequences by comparing nucleic acid or polypeptide sequences to sequence databases and by calculating the statistical significance of matches. For example, the polypeptide encoded by the nucleic acid of SEQ ID NO: 94 was used for the TBLASTN algorithm, with default settings and the filter to ignore low complexity sequences set off. The output of the analysis was viewed by pairwise comparison, and ranked according to the probability score (E-value), where the score reflect the probability that a particular alignment occurs by chance (the lower the E-value, the more significant the hit). In addition to E-values, comparisons were also scored by percentage identity. Percentage identity refers to the number of identical nucleotides (or amino acids) between the two compared nucleic acid (or polypeptide) sequences over a particular length. In some instances, the default parameters may be adjusted to modify the stringency of the search. For example the E-value may be increased to show less stringent matches. This way, short nearly exact matches may be identified.

[0516] Table A2 provides a list of nucleic acid sequences related to SEQ ID NO: 94 and SEQ ID NO: 95.

TABLE A2
Examples of OsBURP-like nucleic acids and polypeptides:

| | Nucleic | Poly- |
|---|---|---|
| | acid | peptide |
| | SEQ | SEQ |
| Plant Source | ID NO: | ID NO: |
| Oryza sativa_BURP_dist_OsBURP02 | 94 | 95 |
| O. sativa BURP07 | 96 | 97 |
| O. sativa BURP01 | 98 | 99 |
| O. sativa BURP08 | 100 | 101 |
| O. sativa BURP06 | 102 | 103 |
| Triticum_aestivum_AJ575664 | 104 | 105 |
| Hordeum_vulgare_subsp_vulgare_AK252727 | 106 | 107 |
| A. thaliana RD22_AT5G25610.1 | 108 | 109 |
| Brassica_napus_AY293830 | 110 | 111 |
| O. sativa OsBURP17 | 112 | 113 |
| O. sativa OsBURP03 | 114 | 115 |
| Zea_mays_BT036729 | 116 | 117 |
| O. sativa OsBURP05 | 118 | 119 |
| Medicago_truncatula_BT051769 | 120 | 121 |
| P.trichocarpa_561796 | 122 | 123 |
| Vitis vinifera_LOC100249127 | 124 | 125 |
| Bruguiera_gymnorhiza_AB062746 | 126 | 127 |
| Mt_BURP_dist | 128 | 129 |
| Gossypium_arboreum_AY641991 | 130 | 131 |
| Gossypium_arboreum_AY641990 | 132 | 133 |
| Gossypium_hirsutum_AY072821 | 134 | 135 |
| Gossypium_hirsutum_AY343972 | 136 | 137 |
| Glycine_max_EU679375 | 138 | 139 |

[0517] Sequences have been tentatively assembled and publicly disclosed by research institutions, such as The Institute for Genomic Research (TIGR; beginning with TA). The Eukaryotic Gene Orthologs (EGO) database may be used to identify such related sequences, either by keyword search or by using the BLAST algorithm with the nucleic acid sequence or polypeptide sequence of interest. Special nucleic acid sequence databases have been created for particular organisms, such as by the Joint Genome Institute. Furthermore, access to proprietary databases, has allowed the identification of novel nucleic acid and polypeptide sequences.

### 1.3 AP2/ERF-Like Polypeptides

[0518] Sequences (full length cDNA, ESTs or genomic) related to SEQ ID NO: 159 and SEQ ID NO: 160 were identified amongst those maintained in the Entrez Nucleotides database at the National Center for Biotechnology Information (NCBI) using database sequence search tools, such as the Basic Local Alignment Tool (BLAST) (Altschul et al. (1990) J. Mol. Biol. 215:403-410; and Altschul et al. (1997) Nucleic Acids Res. 25:3389-3402). The program is used to find regions of local similarity between sequences by comparing nucleic acid or polypeptide sequences to sequence databases and by calculating the statistical significance of matches. For example, the polypeptide encoded by the nucleic acid of SEQ ID NO: 159 was used for the TBLASTN algorithm, with default settings and the filter to ignore low complexity sequences set off. The output of the analysis was viewed by pairwise comparison, and ranked according to the probability score (E-value), where the score reflect the probability that a particular alignment occurs by chance (the lower the E-value, the more significant the hit). In addition to E-values, comparisons were also scored by percentage identity. Percentage identity refers to the number of identical nucleotides (or amino acids) between the two compared nucleic acid (or polypeptide) sequences over a particular length. In some instances, the default parameters may be adjusted to modify the stringency of the search. For example the E-value may be increased to show less stringent matches. This way, short nearly exact matches may be identified.

[0519] Table A3 provides a list of nucleic acid sequences related to SEQ ID NO: 159 and SEQ ID NO: 160.

TABLE A3
Examples of AP2/ERF nucleic acids and polypeptides

| | Nucleic | Poly- |
|---|---|---|
| | acid | peptide |
| | SEQ | SEQ |
| Name | ID NO: | ID NO: |
| M_truncatula_TC117996#1_CDS_{———} | 159 | 160 |
| M_truncatula_TC125274#1 | 161 | 162 |
| A_thaliana_AT4G06746_1#1 | 163 | 164 |
| T_aestivum_TC314990#1 | 165 | 166 |
| T_aestivum_TC277211#1 | 167 | 168 |
| O_sativa_LOC_Os04g55520_1#1 | 169 | 170 |
| S_lycopersicum_TC196769#1_CDS_{———} | 171 | 172 |
| B_napus_TC67876#1 | 173 | 174 |
| H_annuus_TC31134#1 | 175 | 176 |
| TraitMillCDS_{—} | 177 | 178 |
| B_napus_TC86323#1 | 179 | 180 |
| B_napus_TC79173#1 | 181 | 182 |
| B_napus_TC89313#1 | 183 | 184 |
| A_thaliana_AT2G23340_1#1 | 185 | 186 |
| A_thaliana_AT4G36900_1#1_CDS_{———} | 187 | 188 |
| B_napus_TC72792#1 | 189 | 190 |
| P_trichocarpa_CV260432#1 | 191 | 192 |
| P_trichocarpa_TC91546#1 | 193 | 194 |
| P_trichocarpa_TC111318#1 | 195 | 196 |
| G_max_Glyma01g39540_1#1 | 197 | 198 |
| A_thaliana_AT1G46768_1#1 | 199 | 200 |
| T_aestivum_TC277269#1 | 201 | 202 |
| H_annuus_TC30931#1 | 203 | 204 |
| S_lycopersicum_TC213116#1 | 205 | 206 |
| A_thaliana_AT5G67190_1#1 | 207 | 208 |
| B_napus_TC68928#1 | 209 | 210 |
| P_trichocarpa_826816#1 | 211 | 212 |
| G_max_Glyma05g19050_1#1 | 213 | 214 |
| G_max_Glyma17g18580_1#1 | 215 | 216 |
| P_trichocarpa_644094#1 | 217 | 218 |
| G_max_TC266306#1 | 219 | 220 |
| M_truncatula_TC129893#1_CDS_{———} | 221 | 222 |
| G_max_TC258747#1 | 223 | 224 |
| G_max_Glyma14g09320_1#1 | 225 | 226 |
| H_annuus_TC34117#1 | 227 | 228 |
| H_annuus_HA04MC01018_66822928_1017#1 | 229 | 230 |
| Z_mays_TC411151#1 | 231 | 232 |
| Z_mays_TA32842_4577999#1 | 233 | 234 |
| Z_mays_TC403235#1 | 235 | 236 |
| O_sativa_Os06g0166400#1 | 237 | 238 |
| O_sativa_TC312964#1_CDS_{———} | 239 | 240 |
| B_napus_BN06MC02259_42032738_2254#1 | 241 | 242 |
| B_napus_TC73559#1 | 243 | 244 |
| A_thaliana_AT3G50260_1#1 | 245 | 246 |
| AT1G21910.1 | 247 | 248 |
| AT1G77640.1 | 249 | 250 |
| AT1G44830.1 | 251 | 252 |
| AT4G31060.1 | 253 | 254 |
| AT5G21960.1 | 255 | 256 |
| AT1G19210.1 | 257 | 258 |
| AT1G74930.1 | 259 | 260 |
| AT1G22810.1 | 261 | 262 |
| AT1G71520.1 | 263 | 264 |

[0520] Sequences have been tentatively assembled and publicly disclosed by research institutions, such as The Institute for Genomic Research (TIGR; beginning with TA). The Eukaryotic Gene Orthologs (EGO) database may be used to identify such related sequences, either by keyword search or by using the BLAST algorithm with the nucleic acid sequence or polypeptide sequence of interest. Special nucleic acid sequence databases have been created for particular organisms, such as by the Joint Genome Institute. Furthermore, access to proprietary databases, has allowed the identification of novel nucleic acid and polypeptide sequences.

### 1.4 TPS, TPP and TPS-TPP Polypeptide

[0521] Sequences (full length, partial cDNAs, ESTs or genomic) related to TPS and TPP enzymes were identified amongst those maintained in the Entrez Nucleotides database at the National Center for Biotechnology Information (NCBI) using database sequence search tools, such as the Basic Local Alignment Tool (BLAST) (Altschul et al. (1990) J. Mol. Biol. 215:403-410; and Altschul et al. (1997) Nucleic Acids Res. 25:3389-3402). The program is used to find regions of local similarity between sequences by comparing nucleic acid or polypeptide sequences to sequence databases and by calculating the statistical significance of matches. For example, the polypeptide encoded by the nucleic acid of SEQ ID NO: 272 was used for the TBLASTN algorithm, with default settings and the filter to ignore low complexity sequences set off. The output of the analysis was viewed by pairwise comparison, and ranked according to the probability score (E-value), where the score reflect the probability that a particular alignment occurs by chance (the lower the E-value, the more significant the hit). In addition to E-values, comparisons were also scored by percentage identity. Percentage identity refers to the number of identical nucleotides (or amino acids) between the two compared nucleic acid (or polypeptide) sequences over a particular length. In some instances, the default parameters may be adjusted to modify the stringency of the search. For example the E-value may be increased to show less stringent matches. This way, short nearly exact matches may be identified.

[0522] Table A4, A5 and A6 provide a list of nucleic acid and protein sequences of TPS and TPP enzymes and fusions of the same, respectively.

TABLE A4
Examples of TPS polynucleotides and polypeptides:

| | | Poly- | Poly- |
|---|---|---|---|
| | | nucleotide | peptide |
| Enzyme | | SEQ | SEQ |
| class | Name | ID NO: | ID NO: |
| TPS | TPSportioninTPS-TPP-cloned2cloningaa | 272 | 273 |
| TPS | TPSportioninTPS-TPP | 274 | 275 |
| TPS | A.thaliana_AT1G16980.1#1_Class-I | 276 | 277 |
| TPS | A.thaliana_AT1G17000.1#1_Class-I | 278 | 279 |
| TPS | A.thaliana_AT1G78580.1#1_Class-I | 280 | 281 |
| TPS | A.thaliana_AT4G27550.1#1_Class-I | 282 | 283 |
| TPS | O.sativa_LOC_Os05g44210.1#1_Class-I | 284 | 285 |
| TPS | P.tremuloides_828543#1_Class-I | 286 | 287 |
| TPS | S.bicolor_Sb09g025790.1#1_Class-I | 288 | 289 |
| TPS | S.lepidophylla_U96736#1_Class-I | 290 | 291 |
| TPS | S.lycopersicum_EF151131#1_Class-I | 292 | 293 |
| TPS | T.aestivum_FJ167677#1_Class-I | 294 | 295 |
| TPS | E.coli_AAS99849.1_OtsA_BAC | 296 | 297 |

TABLE A5
Examples of TPP polynucleotides and polypeptides:

| | | Nucleotide | Polypeptide |
|---|---|---|---|
| Enzyme class | Name | SEQ ID NO: | SEQ ID NO: |
| TPP-classIII-B | TPPcloned-3cloningaa | 298 | 299 |
| TPP-classIII-B | A.thaliana_AT1G78090.1#1_Class-III-B | 300 | 301 |
| TPP-classIII-B | A.thaliana_AT1G22210.1#1_Class-III-B | 302 | 303 |
| TPP-classIII-B | A.thaliana_AT1G35910.1#1_Class-III-B | 304 | 305 |
| TPP-classIII-B | A.thaliana_AT2G22190.1#1_Class-III-B | 306 | 307 |
| TPP-classIII-B | A.thaliana_AT4G39770.1#1_Class-III-B | 308 | 309 |
| TPP-classIII-B | A.thaliana_AT5G10100.1#1_Class-III-B | 310 | 311 |
| TPP-classIII-B | A.thaliana_AT5G65140.1#1_Class-III-B | 312 | 313 |
| TPP-classIII-B | B.napus_BN06MC00179_43971274@178#1_Class-III-B | 314 | 315 |
| TPP-classIII-B | B.napus_BN06MC07104_42537476@7087#1_Class-III-B | 316 | 317 |
| TPP-classIII-B | B.napus_BN06MC14578_43887676@14532#1_Class-III-B | 318 | 319 |
| TPP-classIII-B | G.max_GM06MC01001_47125400@994#1_Class-III-B | 320 | 321 |
| TPP-classIII-B | G.max_GM06MC02336_48986355@2319#1_Class-III-B | 322 | 323 |
| TPP-classIII-B | G.max_GM06MC07245_50736990@7181#1_Class-III-B | 324 | 325 |
| TPP-classIII-B | H.vulgare_c62965763hv270303@10320#1_Class-III-B | 326 | 327 |
| TPP-classIII-B | O.sativa_LOC_Os02g51680.1#1_Class-III-B | 328 | 329 |
| TPP-classIII-B | O.sativa_LOC_Os03g26910.1#1_Class-III-B | 330 | 331 |
| TPP-classIII-B | O.sativa_LOC_Os07g43160.1#1_Class-III-B | 332 | 333 |
| TPP-classIII-B | O.sativa_LOC_Os08g31630.1#1_Class-III-B | 334 | 335 |
| TPP-classIII-B | O.sativa_LOC_Os09g20390.1#1_Class-III-B | 336 | 337 |
| TPP-classIII-B | P.patens_208578#1_Class-III-B | 338 | 339 |
| TPP-classIII-B | P.tremuloides_760807#1_Class-III-B | 340 | 341 |
| TPP-classIII-B | P.trichocarpa_EF146154#1_Class-III-B | 342 | 343 |
| TPP-classIII-B | T.aestivum_TA06MC06019_54656424@6005#1_Class-III-B | 344 | 345 |
| TPP-classIII-B | Z.mays_ZM07MC19692_BFb0134L02@19642#1_Class-III-B | 346 | 347 |
| TPP-classIII-B | Z.mays_ZM07MC23790_BFb0059J15@23724#1_Class-III-B | 348 | 349 |
| TPP-classIII-B | Z.mays_ZM07MC27487_BFb0200M10@27405#1_Class-III-B | 350 | 351 |
| TPP-classIII-B | Z.mays_ZM07MC27735_BFb0207C15@27651#1_Class-III-B | 352 | 353 |
| TPP-classIII-B | Z.mays_ZM07MC35169_BFb0383A11@35062#1_Class-III-B | 354 | 355 |
| TPP-classIII-B | E.coli_AAS99850.1_OTsB_BAC | | 356 |
| TPP-classIII-B | S.cerevisiae_NP_010359.1_Tps2p_FUNGI | | 357 |
| TPP-classIII-A | A.thaliana_AT4G12430.1#1_Class-III-A | 358 | 359 |
| TPP-classIII-A | A.thaliana_AT4G22590.1#1_Class-III-A | 360 | 361 |
| TPP-classIII-A | A.thaliana_AT5G51460.1#1_Class-III-A | 362 | 363 |
| TPP-classIII-A | G.max_GM06MC27748_sae81b02@27120#1_Class-III-A | 364 | 365 |
| TPP-classIII-A | O.sativa_LOC_Os02g44230.1#1_Class-III-A | 366 | 367 |
| TPP-classIII-A | O.sativa_LOC_Os04g46760.1#1_Class-III-A | 368 | 369 |
| TPP-classIII-A | O.sativa_LOC_Os07g30160.1#1_Class-III-A | 370 | 371 |
| TPP-classIII-A | O.sativa_LOC_Os10g40550.1#1_Class-III-A | 372 | 373 |
| TPP-classIII-A | P.tremuloides_570601#1_Class-III-A | 374 | 375 |
| TPP-classIII-A | P.tremuloides_837090#1_Class-III-A | 376 | 377 |
| TPP-classIII-A | T.aestivum_c54449998@14156#1_Class-III-A | 378 | 379 |
| TPP-classIII-A | Z.mays_ZM07MC26856_BFb0183M21@26776#1_Class-III-A | 380 | 381 |
| TPP-classIII-A | Z.mays_ZM07MC33344_BFb0308C14@33243#1_Class-III-A | 382 | 383 |
| TPP-classIII-A | Z.mays_ZM07MSbpsHQ_61987012.f01@48342#1_Class-III-A | 384 | 385 |
| TPP-classII | A.thaliana_AT1G06410.1#1_Class-II | 386 | 387 |
| TPP-classII | A.thaliana_AT1G23870.1#1_Class-II | 388 | 389 |
| TPP-classII | A.thaliana_AT1G60140.1#1_Class-II | 390 | 391 |
| TPP-classII | A.thaliana_AT1G68020.1#1_Class-II | 392 | 393 |
| TPP-classII | A.thaliana_AT1G70290.1#1_Class-II | 394 | 395 |
| TPP-classII | A.thaliana_AT2G18700.1#1_Class-II | 396 | 397 |
| TPP-classII | A.thaliana_AT4G17770.1#1_Class-II | 398 | 399 |
| TPP-classII | G.biloba_AY884150#1_Class-II | 400 | 401 |
| TPP-classII | G.hirsutum_AY628139#1_Class-II | 402 | 403 |
| TPP-classII | O.sativa_LOC_Os01g53000.1#1_Class-II | 404 | 405 |
| TPP-classII | O.sativa_LOC_Os01g54560.1#1_Class-II | 406 | 407 |
| TPP-classII | O.sativa_LOC_Os02g54820.1#1_Class-II | 408 | 409 |
| TPP-classII | O.sativa_LOC_Os03g12360.1#1_Class-II | 410 | 411 |
| TPP-classII | O.sativa_LOC_Os05g44100.1#1_Class-II | 412 | 413 |
| TPP-classII | O.sativa_LOC_Os08g34580.1#1_Class-II | 414 | 415 |
| TPP-classII | O.sativa_LOC_Os09g20990.1#1_Class-II | 416 | 417 |
| TPP-classII | O.sativa_LOC_Os09g23350.1#1_Class-II | 418 | 419 |
| TPP-classII | P.patens_190874#1_Class-II | 420 | 421 |
| TPP-classII | P.tremuloides_561404#1_Class-II | 422 | 423 |
| TPP-classII | P.tremuloides_568670#1_Class-II | 424 | 425 |
| TPP-classII | P.tremuloides_757196#1_Class-II | 426 | 427 |
| TPP-classII | P.tremuloides_806458#1_Class-II | 428 | 429 |
| TPP-classII | S.lycopersicum_AB368491#1_Class-II | 430 | 431 |
| TPP-classII | Z.marina_EU399759#1_Class-II | 432 | 433 |
| TPP-classII | Z.mays_ZM07MC10175_62174622@10156#1_Class-II | 434 | 435 |
| TPP-classII | Z.mays_ZM07MC29609_BFb0010E24@29519#1_Class-II | 436 | 437 |
| TPP-classII | Z.mays_ZM07MC36251_BFb0274J14@36138#1_Class-II | 438 | 439 |

TABLE A6
Examples of TPS-TPP polynucleotides and polypeptides:

| | | Nucleotide | Polypeptide |
|---|---|---|---|
| Enzyme class | Name | SEQ ID NO: | SEQ ID NO: |
| Fusion TPS-TPP | A.thaliana_DNTPS1-TPPB | 440 | 441 |
| Fusion TPS-TPP | S.cerevisiae_TPS1/TPS2_fusion | 442 | 443 |
| Fusion TPS-TPP | S.cerevisiae_Chl.TPS1/TPS2_fusion | 444 | 445 |
| Fusion TPS-TPP | A.dehalogenans_YP_463663.1_BAC_Fusion | | 446 |
| Fusion TPS-TPP | B.vulgatus_YP_001300510.1_BAC_Fusion | | 447 |
| Fusion TPS-TPP | C.hutchinsonii_YP_677030.1_BAC_Fusion | | 448 |
| Fusion TPS-TPP | M.xanthus_YP_629451.1_BAC_Fusion | | 449 |
| Fusion TPS-TPP | P.distasoni_YP_001305229.1_BAC_Fusion | | 450 |
| Fusion TPS-TPP | A.fumigatus_XP_755036.1_FUNGI_Fusion | | 451 |
| Fusion TPS-TPP | A.terreus_XP_001217556.1_FUNGI_Fusion | | 452 |
| Fusion TPS-TPP | C.albicans_EAL02458.1_FUNGI_Fusion | | 453 |
| Fusion TPS-TPP | P.stipitis_XP_001385509.2_FUNGI_Fusion | | 454 |

[0523] Sequences have been tentatively assembled and publicly disclosed by research institutions, such as The Institute for Genomic Research (TIGR; beginning with TA). The Eukaryotic Gene Orthologs (EGO) database may be used to identify such related sequences, either by keyword search or by using the BLAST algorithm with the nucleic acid sequence or polypeptide sequence of interest. Special nucleic acid sequence databases have been created for particular organisms, such as by the Joint Genome Institute. Furthermore, access to proprietary databases, has allowed the identification of novel nucleic acid and polypeptide sequences.

### Example 2

### Alignment of Sequences Related to the Polypeptide Sequences Used in Methods of the Invention

### 2.1 CLC-Like Polypeptides

[0524] Alignment of polypeptide sequences was performed using the ClustalW 2.0 algorithm of progressive alignment (Thompson et al. (1997) Nucleic Acids Res 25:4876-4882; Chema et al. (2003). Nucleic Acids Res 31:3497-3500) with standard setting (slow alignment, similarity matrix: Gonnet, gap opening penalty 10, gap extension penalty: 0.2). Minor manual editing was done to further optimise the alignment. The CLC-like polypeptides are aligned in FIG. 2.

[0525] A phylogenetic tree of CLC-like polypeptides (FIG. 3) was constructed using MAFFT with standard settings (Katoh and Toh (2008) Briefings in Bioinformatics 9:286-298). Confidence for 100 bootstrap repetitions is indicated for major branching.

### 2.2 OsBURP-Like Polypeptides

[0526] Alignment of polypeptide sequences was performed using MAFFT with standard settings (Katoh and Toh (2008) Briefings in Bioinformatics 9:286-298). The OsBURP-like polypeptides are aligned in FIG. 6. MAFFT was also used to generate a phylogenetic tree and the cladogram (FIG. 7) was drawn using Dendroscope (Huson et al. (2007), BMC Bioinformatics 8(1):460). Confidence for 100 bootstrap repetitions is indicated for major branching.

### 2.3 AP2/ERF-Like Polypeptides

[0527] Alignment of polypeptide sequences was performed using the ClustalW 2.0 algorithm of progressive alignment (Thompson et al. (1997) Nucleic Acids Res 25:4876-4882; Chema et al. (2003); Nucleic Acids Res 31:3497-3500) with standard setting (slow alignment, similarity matrix: Gonnet, gap opening penalty 10, gap extension penalty: 0.2). Minor manual editing was done to further optimise the alignment. The AP2/ERF polypeptides are aligned in FIG. 9.

[0528] A phylogenetic tree of AP2/ERF polypeptides (FIG. 10) was constructed using a neighbour-joining clustering algorithm as provided in the AlignX programme from the Vector NTI (Invitrogen).

### 2.4 TPS, TPP and TPS-TPP Polypeptide

[0529] Alignment of polypeptide sequences is performed using the ClustalW 2.0 algorithm of progressive alignment (Thompson et al. (1997) Nucleic Acids Res 25:4876-4882; Chema et al. (2003). Nucleic Acids Res 31:3497-3500) with standard setting (slow alignment, similarity matrix: Gonnet (or Blosum 62 (as for example used in the Vector NTI package provided by Invitrogen), gap opening penalty 10, gap extension penalty: 0.2). Minor manual editing may be done to further optimise the alignment.

[0530] A phylogenetic tree of TPS, TPP and/or TPS-TPP polypeptides is constructed using a neighbour-joining clustering algorithm as provided in the AlignX programme from the Vector NTI (Invitrogen).

[0531] A phylogenetic tree of TPS and TPP polypeptides of Arabidopsis thaliana and saccharomyces cerevise origin is shown in FIG. 14.

### Example 3

### Calculation of Global Percentage Identity Between Polypeptide Sequences Useful In Performing the Methods of the Invention

### 3.1 CLC-Like Polypeptides

[0532] Global percentages of similarity and identity between full length polypeptide sequences useful in performing the methods of the invention were determined using one of the methods available in the art, the MatGAT (Matrix Global Alignment Tool) software (BMC Bioinformatics. 2003 4:29. MatGAT: an application that generates similarity/identity matrices using protein or DNA sequences. Campanella J J, Bitincka L, Smalley J; software hosted by Ledion Bitincka). MatGAT software generates similarity/identity matrices for DNA or protein sequences without needing pre-alignment of the data. The program performs a series of pair-wise alignments using the Myers and Miller global alignment algorithm (with a gap opening penalty of 12, and a gap extension penalty of 2), calculates similarity and identity using for example Blosum 62 (for polypeptides), and then places the results in a distance matrix. Sequence similarity is shown in the bottom half of the dividing line and sequence identity is shown in the top half of the diagonal dividing line.

[0533] Parameters used in the comparison were: Scoring matrix: Blosum62, First Gap: 12, Extending Gap: 2.

[0534] Results of the software analysis are shown in Table B1 for the global similarity and identity over the full length of the polypeptide sequences. The sequence identity (in %) between the CLC-like polypeptide sequences useful in performing the methods of the invention can be as low as 36% but is generally higher than 40% compared to SEQ ID NO: 2 (represented by Os_TC285852 on line 24).

TABLE B1
MatGAT results for global similarity and identity over the full length of the polypeptide sequences.

| | | 1 | 2 | 3 | 4 | 5 | 6 | 7 | 8 | 9 | 10 | 11 | 12 | 13 | 14 | 15 |
|---|---|---|---|---|---|---|---|---|---|---|---|---|---|---|---|---|
| 1. | AT5g40890 | | 50.6 | 40.7 | 49.4 | 47.3 | 79.9 | 87.9 | 52.3 | 42.5 | 42.0 | 51.7 | 78.1 | 77.7 | 51.3 | 39.2 |
| 2. | Os01g65500 | 67.2 | | 42.1 | 55.9 | 51.6 | 50.2 | 50.1 | 55.2 | 43.6 | 43.1 | 56.3 | 49.6 | 50.9 | 54.9 | 40.1 |
| 3. | Os03g48940_1 | 58.2 | 57.9 | | 40.7 | 40.0 | 41.1 | 39.8 | 42.1 | 69.1 | 68.7 | 42.0 | 40.1 | 40.2 | 39.5 | 91.4 |
| 4. | Os04g55210 | 68.4 | 72.0 | 57.1 | | 60.7 | 50.1 | 49.9 | 64.6 | 43.3 | 43.7 | 63.7 | 48.5 | 49.6 | 62.1 | 39.3 |
| 5. | Os08g20570_2 | 66.3 | 67.1 | 57.8 | 74.4 | | 48.5 | 49.0 | 59.7 | 42.9 | 43.3 | 57.2 | 48.1 | 48.2 | 56.7 | 36.5 |
| 6. | Pt_829777 | 88.2 | 68.1 | 57.5 | 68.9 | 67.1 | | 81.9 | 52.9 | 43.1 | 43.1 | 51.1 | 80.1 | 80.9 | 51.6 | 40.0 |
| 7. | AT3G27170 | 92.7 | 67.1 | 57.6 | 68.4 | 67.1 | 89.8 | | 52.7 | 42.3 | 42.2 | 52.2 | 78.2 | 77.6 | 51.3 | 38.4 |
| 8. | AT5G33280 | 69.4 | 72.1 | 59.1 | 78.0 | 76.1 | 70.3 | 69.9 | | 43.9 | 43.9 | 72.9 | 51.5 | 51.2 | 71.0 | 38.6 |
| 9. | Gm01g44950 | 60.3 | 62.4 | 78.7 | 62.4 | 59.6 | 60.8 | 60.3 | 60.9 | | 98.6 | 45.4 | 41.8 | 42.7 | 43.7 | 65.1 |
| 10. | Gm11g00690 | 59.9 | 62.0 | 78.5 | 62.6 | 59.9 | 60.4 | 60.3 | 60.8 | 99.4 | | 45.1 | 41.8 | 42.7 | 43.6 | 64.6 |
| 11. | Gm13g23080 | 70.8 | 72.0 | 59.6 | 76.4 | 74.6 | 70.7 | 71.8 | 85.1 | 62.9 | 62.7 | | 51.0 | 50.5 | 80.4 | 38.5 |
| 12. | Gm19g25680_2 | 87.2 | 67.5 | 58.1 | 67.9 | 68.4 | 88.9 | 87.3 | 71.6 | 59.6 | 59.3 | 71.6 | | 86.2 | 51.0 | 38.9 |
| 13. | Gm_TC286373 | 87.6 | 69.5 | 58.1 | 69.6 | 67.6 | 90.3 | 88.3 | 71.3 | 61.4 | 61.4 | 71.3 | 91.3 | | 51.3 | 39.4 |
| 14. | Mt_TC137578 | 69.7 | 70.6 | 57.5 | 77.5 | 74.4 | 70.4 | 70.5 | 83.0 | 61.7 | 61.5 | 88.9 | 69.8 | 70.4 | | 37.3 |
| 15. | Os03g48940_2 | 55.2 | 55.0 | 93.2 | 54.6 | 54.1 | 54.8 | 54.5 | 55.6 | 74.3 | 74.2 | 55.6 | 55.7 | 55.2 | 54.3 | |
| 16. | Os08g20570_1 | 67.7 | 70.6 | 56.3 | 78.0 | 95.5 | 69.5 | 68.7 | 76.4 | 61.3 | 61.7 | 75.1 | 68.6 | 69.8 | 75.9 | 53.1 |
| 17. | Os_TC286403 | 68.1 | 71.4 | 56.9 | 99.0 | 73.9 | 69.1 | 68.0 | 77.8 | 63.0 | 62.8 | 75.8 | 68.1 | 69.1 | 77.1 | 54.5 |
| 18. | Os_TC300750 | 68.4 | 72.0 | 57.1 | 99.9 | 74.1 | 69.3 | 68.4 | 78.0 | 62.7 | 62.6 | 76.4 | 67.9 | 69.4 | 77.5 | 54.6 |
| 19. | Pt_837368 | 72.4 | 72.1 | 58.2 | 80.2 | 75.5 | 73.8 | 72.7 | 88.4 | 62.5 | 62.2 | 86.6 | 72.4 | 74.1 | 86.0 | 54.7 |
| 20. | AT5G26240 | 61.0 | 62.2 | 78.4 | 61.8 | 58.8 | 61.7 | 61.2 | 61.7 | 89.1 | 89.0 | 61.6 | 60.7 | 61.7 | 60.9 | 74.0 |
| 21. | Gm05g14760 | 82.6 | 65.7 | 55.6 | 65.5 | 65.7 | 84.8 | 83.1 | 68.5 | 57.8 | 57.8 | 68.8 | 87.9 | 94.5 | 66.9 | 52.6 |
| 22. | Gm16g06190 | 81.2 | 64.9 | 60.2 | 63.6 | 63.3 | 82.5 | 81.8 | 66.8 | 56.8 | 56.4 | 66.7 | 90.3 | 85.4 | 64.6 | 57.0 |
| 23. | Gm19g25680_1 | 88.6 | 68.6 | 58.1 | 69.2 | 68.7 | 90.3 | 88.7 | 71.7 | 60.4 | 60.2 | 72.1 | 98.6 | 92.7 | 70.9 | 55.6 |
| 24. | Os_TC285852 | 79.4 | 65.4 | 57.0 | 66.0 | 64.2 | 80.6 | 79.6 | 67.8 | 59.3 | 59.2 | 66.5 | 79.9 | 81.6 | 67.0 | 55.3 |
| 25. | Os_TC299772 | 59.0 | 61.6 | 88.9 | 61.8 | 58.7 | 59.8 | 60.0 | 60.1 | 86.2 | 86.1 | 60.7 | 60.0 | 60.6 | 60.0 | 84.5 |
| 26. | Os_TC300965 | 68.4 | 97.5 | 59.2 | 71.0 | 68.8 | 68.3 | 67.9 | 74.0 | 62.5 | 62.3 | 73.7 | 69.2 | 70.5 | 72.0 | 56.3 |
| 27. | Pp_105025 | 67.7 | 68.3 | 60.2 | 70.0 | 66.5 | 69.0 | 67.2 | 68.8 | 64.8 | 64.5 | 68.9 | 68.2 | 68.7 | 66.7 | 57.7 |
| 28. | Pp_151168 | 61.9 | 60.0 | 78.9 | 59.9 | 61.3 | 60.3 | 61.2 | 61.7 | 76.5 | 76.7 | 62.2 | 61.7 | 61.8 | 59.8 | 73.9 |
| 29. | Pt_scaff_152_78 | 70.8 | 70.1 | 59.0 | 77.7 | 74.0 | 72.4 | 71.2 | 86.5 | 61.0 | 61.0 | 85.2 | 71.6 | 72.4 | 83.2 | 55.2 |

| | | 16 | 17 | 18 | 19 | 20 | 21 | 22 | 23 | 24 | 25 | 26 | 27 | 28 | 29 |
|---|---|---|---|---|---|---|---|---|---|---|---|---|---|---|---|
| 1. | AT5g40890 | 50.1 | 48.6 | 49.4 | 54.1 | 41.6 | 72.0 | 71.9 | 79.2 | 65.9 | 41.7 | 51.6 | 48.3 | 42.8 | 53.5 |
| 2. | Os01g65500 | 54.2 | 55.1 | 55.9 | 56.9 | 44.0 | 47.2 | 46.8 | 50.1 | 49.9 | 43.9 | 97.5 | 52.9 | 46.4 | 55.4 |
| 3. | Os03g48940_1 | 40.5 | 40.5 | 40.6 | 42.4 | 69.6 | 36.7 | 40.9 | 40.1 | 38.6 | 88.9 | 42.9 | 47.0 | 64.7 | 42.9 |
| 4. | Os04g55210 | 63.3 | 98.9 | 99.8 | 67.7 | 42.8 | 46.0 | 44.8 | 49.2 | 49.8 | 43.0 | 55.5 | 53.3 | 43.1 | 64.9 |
| 5. | Os08g20570_2 | 95.5 | 59.9 | 60.6 | 60.2 | 41.7 | 44.9 | 42.8 | 48.9 | 46.5 | 41.6 | 52.7 | 47.4 | 45.3 | 57.4 |
| 6. | Pt_829777 | 51.2 | 49.6 | 50.2 | 54.7 | 42.6 | 75.5 | 74.0 | 81.3 | 68.5 | 42.5 | 51.1 | 48.5 | 43.2 | 53.9 |
| 7. | AT3G27170 | 51.2 | 49.0 | 49.9 | 54.8 | 41.7 | 72.4 | 71.7 | 79.2 | 65.5 | 41.5 | 51.2 | 48.2 | 43.2 | 53.9 |
| 8. | AT5G33280 | 62.6 | 63.7 | 64.6 | 77.9 | 43.7 | 47.4 | 46.9 | 52.1 | 49.6 | 43.1 | 56.7 | 49.7 | 44.2 | 74.8 |
| 9. | Gm01g44950 | 43.7 | 43.3 | 43.3 | 45.5 | 81.9 | 39.5 | 38.4 | 41.9 | 40.7 | 74.7 | 45.0 | 48.2 | 65.5 | 45.3 |
| 10. | Gm11g00690 | 44.1 | 43.6 | 43.6 | 45.8 | 81.2 | 39.5 | 38.3 | 41.9 | 40.6 | 74.2 | 44.6 | 48.1 | 65.5 | 45.0 |
| 11. | Gm13g23080 | 60.2 | 62.5 | 63.7 | 76.3 | 45.2 | 47.1 | 46.3 | 51.8 | 47.9 | 43.5 | 57.7 | 50.8 | 46.0 | 74.0 |
| 12. | Gm19g25680_2 | 50.2 | 48.1 | 48.5 | 53.7 | 42.0 | 80.5 | 85.3 | 98.6 | 65.8 | 41.6 | 50.8 | 49.3 | 43.4 | 52.9 |
| 13. | Gm_TC286373 | 50.6 | 49.0 | 49.8 | 54.2 | 41.7 | 94.3 | 79.4 | 87.2 | 67.5 | 41.6 | 51.9 | 49.0 | 42.6 | 53.7 |
| 14. | Mt_TC137578 | 59.6 | 61.1 | 62.1 | 75.6 | 43.3 | 47.7 | 45.5 | 51.6 | 48.4 | 41.7 | 56.0 | 48.3 | 43.8 | 72.6 |
| 15. | Os03g48940_2 | 37.8 | 38.6 | 38.8 | 39.3 | 65.5 | 35.9 | 39.9 | 39.1 | 38.3 | 84.2 | 40.9 | 44.8 | 59.8 | 39.4 |
| 16. | Os08g20570_1 | | 62.4 | 63.2 | 63.2 | 42.6 | 47.3 | 45.3 | 51.0 | 49.0 | 42.8 | 55.5 | 50.0 | 44.0 | 60.4 |
| 17. | Os_TC286403 | 77.6 | | 98.5 | 66.8 | 42.7 | 45.3 | 44.0 | 48.4 | 49.0 | 42.9 | 54.8 | 53.3 | 43.1 | 64.0 |
| 18. | Os_TC300750 | 77.7 | 98.8 | | 67.7 | 42.4 | 46.0 | 44.8 | 49.2 | 49.8 | 43.0 | 55.5 | 53.3 | 42.8 | 64.9 |
| 19. | Pt_837368 | 77.0 | 79.8 | 80.2 | | 44.9 | 50.4 | 48.8 | 54.1 | 51.0 | 43.6 | 59.2 | 52.2 | 44.8 | 94.8 |
| 20. | AT5G26240 | 60.6 | 62.0 | 61.1 | 62.5 | | 38.5 | 38.8 | 42.2 | 40.9 | 75.2 | 45.1 | 50.2 | 64.1 | 44.5 |
| 21. | Gm05g14760 | 66.2 | 65.1 | 65.5 | 69.7 | 58.1 | | 74.0 | 81.6 | 62.9 | 38.4 | 48.1 | 45.5 | 39.2 | 50.0 |
| 22. | Gm16g06190 | 63.8 | 63.2 | 63.6 | 67.9 | 58.0 | 82.4 | | 86.6 | 61.3 | 38.2 | 47.3 | 45.2 | 40.1 | 49.4 |
| 23. | Gm19g25680_1 | 69.7 | 68.8 | 69.2 | 73.7 | 61.7 | 88.4 | 90.4 | | 66.5 | 41.6 | 51.3 | 49.6 | 43.3 | 53.5 |
| 24. | Os_TC285852 | 66.2 | 65.5 | 66.0 | 69.2 | 60.4 | 76.5 | 74.6 | 81.0 | | 39.9 | 50.5 | 47.0 | 40.6 | 50.5 |
| 25. | Os_TC299772 | 60.3 | 61.4 | 61.8 | 60.2 | 84.7 | 56.8 | 56.7 | 60.7 | 60.1 | | 44.7 | 49.3 | 63.9 | 43.4 |
| 26. | Os_TC300965 | 70.6 | 70.4 | 71.0 | 74.3 | 62.1 | 67.5 | 66.2 | 70.4 | 66.7 | 61.3 | | 53.8 | 47.6 | 57.7 |
| 27. | Pp_105025 | 69.7 | 70.2 | 69.9 | 69.5 | 65.8 | 64.7 | 63.0 | 68.9 | 64.2 | 64.4 | 68.3 | | 48.9 | 51.3 |
| 28. | Pp_151168 | 59.9 | 60.2 | 59.7 | 60.8 | 76.1 | 59.4 | 60.4 | 61.6 | 58.0 | 75.0 | 61.6 | 63.4 | | 45.1 |
| 29. | Pt_scaff_152_78 | 74.6 | 77.3 | 77.7 | 95.5 | 61.9 | 69.5 | 68.4 | 72.2 | 68.2 | 59.1 | 72.4 | 67.8 | 61.0 | |

### 3.2 OsBURP-Like Polypeptides

[0535] Global percentages of similarity and identity between full length polypeptide sequences useful in performing the methods of the invention were determined using one of the methods available in the art, the MatGAT (Matrix Global Alignment Tool) software (BMC Bioinformatics. 2003 4:29. MatGAT: an application that generates similarity/identity matrices using protein or DNA sequences. Campanella J J, Bitincka L, Smalley J; software hosted by Ledion Bitincka). MatGAT software generates similarity/identity matrices for DNA or protein sequences without needing pre-alignment of the data. The program performs a series of pair-wise alignments using the Myers and Miller global alignment algorithm (with a gap opening penalty of 12, and a gap extension penalty of 2), calculates similarity and identity using for example Blosum 62 (for polypeptides), and then places the results in a distance matrix. Sequence similarity is shown in the bottom half of the dividing line and sequence identity is shown in the top half of the diagonal dividing line.

[0536] Parameters used in the comparison were: Scoring matrix: Blosum62, First Gap: 12, Extending Gap: 2.

[0537] Results of the software analysis are shown in Table B2 for the global similarity and identity over the full length of the polypeptide sequences. The sequence identity (in %) between the OsBURP-like polypeptide sequences useful in performing the methods of the invention is generally higher than 30% compared to SEQ ID NO: 95.

TABLE B2
MatGAT results for global similarity and identity over the full length of the polypeptide sequences.

| | | 1 | 2 | 3 | 4 | 5 | 6 | 7 | 8 | 9 | 10 | 11 | 12 |
|---|---|---|---|---|---|---|---|---|---|---|---|---|---|
| 1. | Os_BURP_dist_OsBURP02 | | 77.7 | 73.1 | 64.7 | 71.8 | 34.1 | 16.9 | 28.7 | 30.2 | 20.4 | 33.7 | 35.5 |
| 2. | OsBURP07 | 81.2 | | 66.2 | 66.8 | 75.4 | 34.8 | 16 | 29.6 | 30.2 | 20.1 | 33.8 | 36.7 |
| 3. | OsBURP01 | 79.4 | 74.4 | | 57.4 | 57.7 | 27.6 | 13.6 | 26.9 | 27.8 | 17.6 | 28.9 | 31.9 |
| 4. | OsBURP08 | 75.8 | 74.4 | 66.8 | | 62.3 | 31.2 | 16.4 | 28.5 | 29.9 | 20.8 | 30.6 | 33.8 |
| 5. | OsBURP06 | 73.9 | 82.6 | 64.8 | 69.2 | | 30.4 | 15 | 27.4 | 28.8 | 19.1 | 30.6 | 32.2 |
| 6. | Triticum_aestivum_AJ575664 | 47.2 | 46.4 | 40.1 | 45.3 | 41.7 | | 20.5 | 27 | 28.1 | 23.1 | 31.4 | 33 |
| 7. | Hordeum_vulgare_AK252727 | 22.6 | 21.8 | 20.2 | 22.9 | 20.4 | 27.4 | | 20 | 21 | 24.1 | 22.8 | 20.5 |
| 8. | AtRD22_AT5G25610.1 | 42.1 | 40.6 | 36 | 41.6 | 37.5 | 46.7 | 31.3 | | 86.5 | 27.4 | 50.1 | 49.6 |
| 9. | Brassica_napus_AY293830 | 42.4 | 40.6 | 36.7 | 42.1 | 37.2 | 46.5 | 31.1 | 91.3 | | 26.7 | 50.3 | 48.9 |
| 10. | OsBURP17 | 28 | 27.2 | 24.2 | 28.2 | 24.7 | 34.2 | 41.9 | 38.5 | 37.7 | | 34.5 | 32.9 |
| 11. | OsBURP03 | 42.4 | 42.4 | 37.8 | 41.3 | 38.9 | 45.5 | 34.3 | 63.2 | 62.9 | 44.7 | | 70.4 |
| 12. | Zea_mays_BT036729 | 47.7 | 47.7 | 42.9 | 46.1 | 42.4 | 49.9 | 30.8 | 61.7 | 62.3 | 42.8 | 77.2 | |
| 13. | OsBURP05 | 43.2 | 42.5 | 38.7 | 41.2 | 38.7 | 45.7 | 32.6 | 50.8 | 51 | 46.3 | 54.8 | 58 |
| 14. | Medicago_truncatula_BT051769 | 53.5 | 52.6 | 46.2 | 54.2 | 49.5 | 50.6 | 27.6 | 59.7 | 59.4 | 35.5 | 54.8 | 60 |
| 15. | P. trichocarpa_561796 | 44.4 | 43.1 | 37.7 | 45.1 | 41.1 | 50.6 | 32.8 | 71.3 | 73.1 | 41.9 | 69.2 | 64.8 |
| 16. | Vitisvinifera_LOC100249127 | 54.2 | 52 | 45.5 | 52 | 48 | 48.1 | 27.9 | 56.6 | 58.4 | 33.3 | 49.2 | 55.2 |
| 17. | Bruguiera_gymnorhiza_AB062746 | 49.7 | 48.5 | 44.3 | 50 | 47.3 | 51.1 | 28.8 | 61.7 | 63.8 | 36.5 | 55.9 | 61.3 |
| 18. | Mt_BURP_dist | 51.1 | 50.8 | 45.6 | 54.4 | 47.9 | 44.8 | 26.1 | 52.6 | 54 | 32.5 | 45.9 | 50.7 |
| 19. | Gossypium_arboreum_AY641991 | 46.5 | 45.2 | 39.6 | 45.2 | 44.1 | 49.7 | 30.9 | 73.2 | 74.7 | 39 | 65.7 | 68.9 |
| 20. | Gossypium_arboreum_AY641990 | 51 | 49.9 | 43.9 | 50.4 | 48.4 | 47.8 | 27.2 | 65.3 | 66.4 | 35.4 | 56.2 | 61.6 |
| 21. | Gossypium_hirsutum_AY072821 | 52.2 | 51 | 44.8 | 51.6 | 49.6 | 48.6 | 27.9 | 66.1 | 67.2 | 36.1 | 57.8 | 62.9 |
| 22. | Gossypium_hirsutum_AY343972 | 51 | 49.9 | 44.2 | 50.4 | 49 | 47.8 | 27.6 | 65.8 | 66.9 | 35.4 | 56.2 | 62.1 |
| 23. | Glycine_max_EU679375 | 48.5 | 46.9 | 40.9 | 48.2 | 44.4 | 53.4 | 31.3 | 68.4 | 69.8 | 40 | 60.1 | 66.9 |

| | | 13 | 14 | 15 | 16 | 17 | 18 | 19 | 20 | 21 | 22 | 23 |
|---|---|---|---|---|---|---|---|---|---|---|---|---|
| 1. | Os_BURP_dist_OsBURP02 | 33.3 | 33.9 | 32.4 | 38.3 | 35.3 | 32.6 | 32.1 | 35.1 | 36.2 | 35.1 | 33.2 |
| 2. | OsBURP07 | 33.2 | 35 | 31.8 | 38.5 | 33.1 | 33.3 | 30.4 | 33.8 | 34.4 | 33.8 | 32.6 |
| 3. | OsBURP01 | 28.6 | 30.2 | 27.3 | 33 | 30.4 | 29 | 27.4 | 29.5 | 29.8 | 29.5 | 28.3 |
| 4. | OsBURP08 | 31.4 | 34.2 | 30.1 | 34.2 | 34.9 | 35.7 | 30.4 | 34 | 34.3 | 34.3 | 32.1 |
| 5. | OsBURP06 | 29.8 | 33 | 31.2 | 35.4 | 32.5 | 31.4 | 30.6 | 33.8 | 34.4 | 34.1 | 30.9 |
| 6. | Triticum_aestivum_AJ575664 | 31 | 32.1 | 32.3 | 32.1 | 31.3 | 26.5 | 31.7 | 31.7 | 32.3 | 31.7 | 31.4 |
| 7. | Hordeum_vulgare_AK252727 | 20.7 | 17.2 | 21 | 18.3 | 19.5 | 16.8 | 21.1 | 18.9 | 19.4 | 19 | 20.6 |
| 8. | AtRD22_AT5G25610.1 | 33.7 | 44.5 | 59.1 | 43.8 | 50.1 | 39 | 58 | 52.3 | 52.8 | 51.9 | 54.3 |
| 9. | Brassica_napus_AY293830 | 33.6 | 46.2 | 61.1 | 45.8 | 51.5 | 38.8 | 60.5 | 54 | 54.5 | 53.7 | 55.4 |
| 10. | OsBURP17 | 37.6 | 24.9 | 31.4 | 23.2 | 25.6 | 23.1 | 27.7 | 25.3 | 25.9 | 25.3 | 28.5 |
| 11. | OsBURP03 | 40.5 | 41 | 58.6 | 38.2 | 43.8 | 33.2 | 51.6 | 43.6 | 44.7 | 43.6 | 48.7 |
| 12. | Zea_mays_BT036729 | 42 | 46 | 53.3 | 41.5 | 48.3 | 36.5 | 51.3 | 46.5 | 47.6 | 46.8 | 53.6 |
| 13. | OsBURP05 | | 35.1 | 34.5 | 33.3 | 34.5 | 31.5 | 35.3 | 34.5 | 35.3 | 34.5 | 35.4 |
| 14. | Medicago_truncatula_BT051769 | 52.8 | | 50.5 | 56.1 | 55.1 | 60.9 | 51.6 | 55.6 | 56.7 | 56.1 | 63 |
| 15. | P. trichocarpa_561796 | 52.9 | 64.8 | | 52.2 | 61.6 | 43.8 | 66.2 | 59.9 | 61.3 | 59.6 | 60.1 |
| 16. | Vitisvinifera_LOC100249127 | 47 | 75.7 | 63.6 | | 54.7 | 50.9 | 51.1 | 57.3 | 58.2 | 57 | 52.9 |
| 17. | Bruguiera_gymnorhiza_AB062746 | 50.5 | 74.4 | 71.8 | 71.7 | | 48.8 | 59.9 | 63.8 | 65.6 | 64.1 | 58.3 |
| 18. | Mt_BURP_dist | 46.5 | 73.2 | 56.9 | 67.4 | 65.5 | | 42.9 | 46.3 | 47.8 | 46.3 | 54.2 |
| 19. | Gossypium_arboreum_AY641991 | 52.8 | 66.2 | 78.3 | 64.4 | 73.9 | 59 | | 83.2 | 85.4 | 83.2 | 62.6 |
| 20. | Gossypium_arboreum_AY641990 | 49 | 72.8 | 70.8 | 71 | 80.1 | 64.8 | 85.4 | | 97 | 98.2 | 59.5 |
| 21. | Gossypium_hirsutum_AY072821 | 50.3 | 74.3 | 71.8 | 72.2 | 81.3 | 65.7 | 87.2 | 97.6 | | 97 | 61.4 |
| 22. | Gossypium_hirsutum_AY343972 | 49.5 | 73.4 | 70.8 | 71.3 | 80.1 | 65.1 | 85.6 | 98.5 | 97.9 | | 59.5 |
| 23. | Glycine_max_EU679375 | 52.3 | 75.5 | 74.8 | 66.8 | 70.3 | 67.3 | 75.8 | 71.4 | 73 | 71.7 | |

### 3.3 AP2/ERF-Like Polypeptides

[0538] Global percentages of similarity and identity between full length polypeptide sequences useful in performing the methods of the invention were determined using one of the methods available in the art, the MatGAT (Matrix Global Alignment Tool) software (BMC Bioinformatics. 2003 4:29. MatGAT: an application that generates similarity/identity matrices using protein or DNA sequences. Campanella J J, Bitincka L, Smalley J; software hosted by Ledion Bitincka). MatGAT software generates similarity/identity matrices for DNA or protein sequences without needing pre-alignment of the data. The program performs a series of pair-wise alignments using the Myers and Miller global alignment algorithm (with a gap opening penalty of 12, and a gap extension penalty of 2), calculates similarity and identity using for example Blosum 62 (for polypeptides), and then places the results in a distance matrix. Sequence similarity is shown in the bottom half of the dividing line and sequence identity is shown in the top half of the diagonal dividing line.

[0539] Parameters used in the comparison were: Scoring matrix: Blosum62, First Gap: 12, Extending Gap: 2.

[0540] Results of the software analysis are shown in Table B3 for the global similarity and identity over the full length of the polypeptide sequences. The sequence identity (in %) between the AP2/ERF polypeptide sequences useful in performing the methods of the invention is generally higher than 60% compared to SEQ ID NO: 160.

[0541] The following annotation is applied in Table B3: 1. G_max_Glyma17g18580_{—}1; 2. H_annuus_TC30931; 3. S_lycopersicum_TC196769—CDS______; 4. A_thaliana_AT4G06746_{—}1; 5. G_max_Glyma05g19050_{—}1; 6. A_thaliana_AT1G46768_{—}1; 7. A_thaliana_AT3G50260_{—}1; 8. H_annuus_TC31134; 9. P_trichocarpa_{—}826816; 10. H_annuus_HAO4MC01018_{—}66822928_{—}1017; 11. P_trichocarpa_{—}644094; 12. G_max_TC258747; 13. B_napus_TC67876; 14. S_lycopersicum_TC213116; 15. H_annuus_TC34117; 16. G_max_Glyma01g39540_{—}1; 17. B_napus_TC79173; 18. M_truncatula_TC125274; 19. P_trichocarpa_TC111318; 20. G_max_Glyma14g09320_{—}1; 21. G_max_TC266306; 22. A_thaliana_AT2G23340_{—}1; 23. B_napus_TC89313; 24. B_napus_BN06MCO2259_{—}42032738_{—}2254; 25. B_napus_TC73559; 26. T_aestivum_TC277269; 27. M_truncatula_TC129893—CDS______; 28. MtAp2ERF_CDS______; 29. M_truncatula_TC117996—CDS______; 30. P_trichocarpa_TC91546; 31. A_thaliana_AT5G67190_{—}1; 32. O_sativa_Os06g0166400; 33. P_trichocarpa_CV260432; 34. B_napus_TC68928; 35. B_napus_TC86323; 36. A_thaliana_AT4G36900_{—}1_CDS______; 37. B_napus_TC72792; 38. Z_mays_TA32842_{—}4577999; 39. O_sativa_LOC_Os04g55520_{—}1; 40. T_aestivum_TC314990; 41. T_aestivum_TC277211; 42. TraitMilICDS______; 43. O_sativa_TC312964_CDS______.

TABLE B3
MatGAT results for global similarity and identity over the full length of the polypeptide
sequences.

| | 1 | 2 | 3 | 4 | 5 | 6 | 7 | 8 | 9 | 10 | 11 | 12 |
|---|---|---|---|---|---|---|---|---|---|---|---|---|
| 1 | | 55.9 | 56.9 | 52.4 | 89.4 | 52.2 | 56.3 | 57.1 | 57.1 | 60.0 | 57.0 | 52.0 |
| 2 | 70.5 | | 61.7 | 48.2 | 54.7 | 50.6 | 52.2 | 72.2 | 58.2 | 53.0 | 58.2 | 52.4 |
| 3 | 72.5 | 71.8 | | 47.7 | 55.2 | 53.0 | 53.2 | 65.0 | 60.9 | 57.2 | 62.4 | 59.4 |
| 4 | 64.0 | 61.3 | 62.7 | | 51.8 | 49.4 | 46.6 | 50.3 | 51.9 | 50.3 | 49.1 | 48.5 |
| 5 | 93.3 | 71.3 | 71.3 | 63.3 | | 55.9 | 57.1 | 55.7 | 56.0 | 59.5 | 56.0 | 53.8 |
| 6 | 66.0 | 61.4 | 69.9 | 68.0 | 67.3 | | 44.1 | 49.4 | 53.9 | 48.5 | 53.7 | 52.1 |
| 7 | 69.3 | 68.0 | 70.6 | 62.7 | 69.9 | 62.1 | | 51.3 | 52.4 | 55.8 | 48.0 | 48.3 |
| 8 | 69.9 | 82.4 | 73.9 | 66.0 | 68.6 | 65.4 | 66.7 | | 57.1 | 54.4 | 58.3 | 53.5 |
| 9 | 71.0 | 73.5 | 79.4 | 61.9 | 71.0 | 69.0 | 68.4 | 71.0 | | 54.5 | 82.3 | 63.1 |
| 10 | 68.2 | 67.5 | 66.9 | 63.1 | 67.5 | 64.3 | 67.5 | 63.7 | 71.3 | | 54.5 | 55.8 |
| 11 | 70.3 | 71.5 | 78.5 | 60.1 | 69.6 | 64.6 | 66.5 | 69.6 | 89.9 | 69.6 | | 60.7 |
| 12 | 70.6 | 64.4 | 75.6 | 60.0 | 68.8 | 66.3 | 67.5 | 68.1 | 80.6 | 70.6 | 80.0 | |
| 13 | 67.3 | 64.2 | 66.0 | 59.9 | 65.4 | 58.0 | 83.3 | 63.6 | 68.5 | 64.8 | 67.9 | 64.2 |
| 14 | 66.3 | 65.1 | 66.3 | 57.8 | 67.5 | 56.6 | 66.3 | 65.7 | 68.1 | 75.3 | 69.9 | 68.1 |
| 15 | 68.9 | 63.5 | 64.7 | 59.9 | 67.7 | 59.9 | 63.5 | 64.7 | 67.1 | 77.2 | 68.9 | 67.7 |
| 16 | 74.4 | 66.1 | 67.3 | 60.7 | 73.8 | 62.5 | 69.6 | 66.7 | 66.1 | 66.7 | 65.5 | 67.9 |
| 17 | 67.5 | 66.9 | 62.1 | 58.6 | 62.7 | 58.0 | 69.8 | 67.5 | 65.1 | 66.9 | 62.7 | 64.5 |
| 18 | 60.5 | 61.0 | 66.3 | 59.9 | 61.0 | 64.5 | 60.5 | 61.6 | 70.3 | 63.4 | 68.6 | 73.8 |
| 19 | 67.1 | 59.0 | 66.5 | 63.6 | 65.9 | 57.8 | 68.8 | 60.1 | 63.0 | 63.0 | 64.7 | 68.2 |
| 20 | 63.8 | 62.1 | 67.2 | 61.5 | 63.2 | 67.8 | 61.5 | 62.1 | 75.9 | 62.1 | 70.7 | 79.3 |
| 21 | 62.6 | 61.5 | 67.8 | 60.3 | 60.9 | 65.5 | 60.9 | 62.1 | 71.8 | 61.5 | 67.8 | 77.6 |
| 22 | 63.1 | 61.9 | 60.8 | 59.1 | 61.4 | 54.0 | 69.3 | 63.6 | 63.1 | 64.2 | 64.8 | 61.4 |
| 23 | 64.2 | 63.6 | 60.2 | 56.8 | 60.8 | 54.5 | 67.6 | 66.5 | 63.6 | 65.9 | 60.8 | 61.9 |
| 24 | 62.6 | 57.5 | 63.1 | 54.2 | 62.6 | 55.3 | 70.4 | 62.0 | 63.7 | 63.7 | 63.7 | 64.8 |
| 25 | 62.0 | 57.5 | 63.1 | 53.6 | 63.1 | 55.3 | 70.9 | 60.3 | 63.1 | 63.7 | 63.7 | 64.2 |
| 26 | 60.3 | 57.0 | 59.8 | 57.0 | 59.2 | 58.7 | 57.5 | 59.2 | 59.8 | 59.2 | 60.9 | 57.5 |
| 27 | 58.3 | 58.3 | 63.9 | 56.1 | 56.7 | 60.6 | 58.9 | 56.1 | 65.6 | 60.6 | 66.7 | 71.7 |
| 28 | 66.5 | 59.3 | 64.8 | 56.0 | 67.0 | 57.7 | 63.2 | 58.8 | 61.5 | 62.1 | 63.2 | 64.8 |
| 29 | 66.5 | 59.3 | 64.8 | 56.0 | 67.0 | 57.7 | 63.2 | 58.8 | 61.5 | 62.1 | 63.2 | 64.8 |
| 30 | 67.0 | 57.7 | 64.8 | 59.3 | 64.8 | 56.0 | 66.5 | 59.9 | 62.1 | 62.1 | 62.6 | 65.4 |
| 31 | 63.0 | 59.8 | 62.5 | 53.8 | 60.9 | 54.3 | 70.7 | 58.7 | 65.8 | 62.5 | 63.0 | 62.0 |
| 32 | 56.5 | 58.7 | 56.0 | 55.4 | 56.0 | 59.2 | 56.0 | 58.7 | 58.7 | 59.8 | 58.2 | 53.8 |
| 33 | 65.8 | 56.7 | 63.6 | 57.2 | 64.7 | 56.7 | 63.1 | 57.8 | 60.4 | 62.0 | 60.4 | 65.2 |
| 34 | 61.7 | 58.0 | 61.2 | 51.1 | 61.2 | 53.2 | 69.1 | 63.3 | 63.8 | 61.2 | 61.7 | 62.2 |
| 35 | 56.3 | 59.4 | 57.8 | 51.6 | 57.8 | 52.6 | 60.4 | 56.3 | 59.4 | 58.9 | 58.9 | 57.8 |
| 36 | 56.1 | 60.2 | 56.1 | 53.6 | 54.6 | 53.6 | 59.2 | 58.2 | 60.2 | 55.6 | 57.7 | 56.1 |
| 37 | 54.8 | 57.4 | 53.8 | 50.8 | 53.8 | 52.3 | 59.4 | 55.3 | 57.9 | 55.3 | 57.4 | 56.9 |
| 38 | 52.1 | 53.4 | 51.1 | 48.9 | 53.0 | 47.9 | 49.8 | 53.4 | 52.5 | 50.7 | 52.5 | 49.8 |
| 39 | 49.4 | 49.8 | 49.4 | 43.8 | 49.4 | 44.2 | 46.8 | 48.5 | 51.1 | 47.6 | 50.2 | 50.2 |
| 40 | 47.3 | 49.4 | 46.9 | 43.9 | 46.4 | 45.2 | 49.4 | 48.1 | 51.0 | 49.4 | 49.4 | 47.7 |
| 41 | 46.9 | 47.7 | 48.1 | 43.6 | 46.9 | 42.8 | 47.7 | 47.3 | 49.4 | 48.1 | 48.1 | 46.5 |
| 42 | 42.7 | 43.5 | 42.7 | 45.6 | 41.5 | 45.2 | 42.3 | 45.2 | 45.6 | 45.6 | 46.0 | 42.7 |
| 43 | 34.3 | 35.6 | 34.6 | 35.9 | 33.3 | 36.2 | 34.3 | 36.2 | 38.1 | 37.5 | 37.1 | 35.2 |
| | 13 | 14 | 15 | 16 | 17 | 18 | 19 | 20 | 21 | 22 | 23 | 24 |
| 1 | 55.2 | 55.9 | 54.1 | 67.5 | 57.6 | 50.6 | 55.6 | 50.6 | 48.9 | 54.5 | 55.1 | 51.6 |
| 2 | 53.0 | 53.5 | 50.6 | 54.8 | 55.2 | 47.2 | 48.0 | 46.4 | 47.3 | 54.0 | 53.1 | 47.3 |
| 3 | 50.3 | 56.6 | 54.7 | 55.6 | 50.9 | 52.2 | 52.3 | 50.3 | 51.9 | 48.6 | 50.0 | 48.6 |
| 4 | 46.0 | 48.3 | 48.0 | 50.0 | 48.1 | 50.6 | 49.5 | 48.3 | 48.9 | 49.2 | 48.6 | 40.1 |
| 5 | 56.4 | 55.8 | 55.2 | 65.9 | 57.6 | 51.7 | 56.4 | 51.7 | 48.6 | 54.5 | 55.7 | 52.9 |
| 6 | 43.2 | 45.4 | 47.4 | 52.3 | 45.8 | 53.4 | 42.3 | 52.6 | 55.7 | 44.7 | 45.3 | 40.6 |
| 7 | 75.0 | 53.0 | 51.2 | 55.4 | 59.8 | 46.2 | 52.5 | 43.9 | 41.9 | 60.2 | 60.2 | 64.5 |
| 8 | 51.2 | 58.3 | 51.2 | 56.0 | 55.6 | 48.9 | 48.0 | 48.1 | 48.7 | 54.5 | 52.8 | 48.6 |
| 9 | 52.9 | 56.9 | 54.1 | 55.9 | 52.5 | 55.9 | 49.5 | 55.4 | 55.6 | 51.6 | 52.5 | 49.7 |
| 10 | 52.4 | 65.1 | 72.0 | 56.7 | 55.5 | 52.2 | 51.1 | 51.1 | 48.9 | 53.9 | 55.1 | 51.3 |
| 11 | 52.0 | 56.5 | 55.2 | 53.1 | 50.3 | 54.5 | 48.9 | 55.0 | 53.3 | 49.5 | 50.8 | 47.2 |
| 12 | 47.4 | 52.8 | 52.3 | 54.9 | 48.9 | 61.7 | 51.6 | 63.7 | 63.2 | 49.7 | 47.3 | 47.2 |
| 13 | | 51.2 | 50.6 | 54.1 | 61.1 | 45.4 | 50.8 | 45.0 | 43.5 | 60.1 | 61.6 | 61.5 |
| 14 | 65.7 | | 65.3 | 57.4 | 54.0 | 45.8 | 53.5 | 47.7 | 45.1 | 53.1 | 51.7 | 49.7 |
| 15 | 64.1 | 73.7 | | 54.7 | 53.6 | 46.6 | 52.2 | 48.4 | 46.9 | 53.8 | 53.1 | 48.4 |
| 16 | 64.3 | 67.3 | 66.1 | | 58.8 | 51.3 | 58.7 | 50.8 | 49.2 | 53.6 | 58.2 | 49.7 |
| 17 | 71.6 | 65.1 | 66.9 | 72.2 | | 46.2 | 55.5 | 46.5 | 46.5 | 83.7 | 93.8 | 58.3 |
| 18 | 62.2 | 62.2 | 62.2 | 63.4 | 61.6 | | 47.0 | 57.7 | 55.9 | 46.2 | 46.9 | 41.6 |
| 19 | 63.0 | 69.4 | 66.5 | 71.7 | 67.6 | 66.5 | | 48.5 | 46.3 | 51.3 | 54.5 | 58.0 |
| 20 | 60.3 | 64.4 | 64.4 | 66.7 | 61.5 | 77.6 | 69.5 | | 90.9 | 44.4 | 46.5 | 42.0 |
| 21 | 59.8 | 62.1 | 63.2 | 63.2 | 63.8 | 71.3 | 67.8 | 95.4 | | 44.5 | 43.5 | 42.5 |
| 22 | 69.3 | 63.6 | 66.5 | 68.2 | 88.6 | 63.1 | 65.9 | 59.1 | 60.8 | | 84.5 | 55.2 |
| 23 | 69.9 | 62.5 | 63.6 | 68.2 | 94.3 | 61.4 | 67.6 | 61.4 | 60.8 | 89.8 | | 56.5 |
| 24 | 69.3 | 64.8 | 64.2 | 61.5 | 72.6 | 58.7 | 69.8 | 59.8 | 61.5 | 69.8 | 70.9 | |
| 25 | 69.8 | 63.7 | 64.2 | 63.1 | 72.6 | 60.3 | 70.9 | 60.3 | 60.9 | 70.4 | 71.5 | 99.4 |
| 26 | 59.8 | 59.2 | 59.8 | 62.6 | 61.5 | 59.8 | 58.7 | 58.7 | 60.3 | 61.5 | 63.7 | 55.9 |
| 27 | 59.4 | 63.3 | 63.9 | 61.7 | 60.0 | 71.7 | 66.7 | 73.3 | 71.7 | 63.9 | 61.7 | 61.7 |
| 28 | 61.0 | 63.7 | 62.1 | 74.7 | 65.4 | 60.4 | 68.7 | 61.0 | 63.2 | 65.9 | 65.9 | 66.5 |
| 29 | 61.0 | 63.7 | 62.1 | 74.7 | 65.4 | 60.4 | 68.7 | 61.0 | 63.2 | 65.9 | 65.9 | 66.5 |
| 30 | 62.1 | 66.5 | 64.3 | 70.3 | 64.8 | 63.2 | 92.9 | 66.5 | 64.8 | 66.5 | 66.5 | 70.9 |
| 31 | 69.0 | 63.6 | 60.9 | 64.7 | 69.0 | 58.2 | 68.5 | 60.3 | 59.8 | 69.0 | 69.0 | 90.2 |
| 32 | 53.8 | 54.9 | 59.8 | 58.7 | 58.2 | 57.1 | 57.1 | 56.0 | 57.1 | 58.7 | 60.3 | 54.3 |
| 33 | 62.0 | 63.6 | 63.1 | 67.4 | 65.2 | 60.4 | 85.6 | 64.7 | 63.1 | 65.8 | 66.3 | 69.5 |
| 34 | 67.6 | 63.3 | 60.6 | 63.3 | 68.6 | 58.0 | 67.0 | 58.0 | 59.6 | 67.0 | 72.3 | 89.9 |
| 35 | 60.9 | 60.4 | 59.9 | 60.4 | 68.2 | 57.8 | 65.6 | 56.3 | 57.8 | 69.3 | 69.3 | 67.2 |
| 36 | 58.2 | 61.7 | 57.7 | 61.2 | 68.9 | 57.7 | 65.8 | 55.6 | 56.1 | 72.4 | 67.9 | 65.8 |
| 37 | 55.8 | 61.4 | 60.9 | 57.9 | 66.5 | 56.9 | 65.5 | 56.9 | 56.9 | 69.0 | 68.5 | 65.5 |
| 38 | 49.8 | 52.1 | 52.5 | 54.8 | 54.3 | 53.0 | 55.7 | 53.9 | 52.1 | 55.3 | 54.3 | 52.1 |
| 39 | 48.1 | 49.4 | 52.4 | 49.8 | 50.6 | 48.5 | 49.8 | 48.9 | 49.8 | 54.1 | 51.9 | 49.4 |
| 40 | 49.8 | 47.7 | 52.3 | 49.0 | 49.0 | 47.7 | 48.5 | 50.6 | 53.1 | 50.6 | 50.6 | 50.2 |
| 41 | 47.7 | 47.7 | 49.4 | 47.3 | 48.6 | 47.7 | 48.1 | 46.9 | 50.2 | 51.4 | 51.0 | 49.4 |
| 42 | 42.3 | 42.7 | 46.0 | 44.4 | 44.8 | 44.8 | 43.5 | 43.5 | 43.5 | 44.0 | 46.0 | 42.7 |
| 43 | 33.7 | 34.9 | 38.4 | 35.2 | 35.6 | 36.5 | 34.0 | 36.2 | 35.6 | 36.2 | 37.1 | 34.3 |
| | 25 | 26 | 27 | 28 | 29 | 30 | 31 | 32 | 33 | 34 | 35 | 36 |
| 1 | 51.6 | 49.2 | 46.8 | 58.2 | 58.2 | 58.2 | 52.1 | 47.1 | 56.1 | 52.6 | 49.7 | 47.6 |
| 2 | 47.3 | 50.0 | 46.4 | 51.6 | 51.6 | 47.3 | 50.3 | 50.3 | 47.3 | 47.7 | 50.5 | 51.8 |
| 3 | 48.6 | 48.1 | 50.5 | 52.2 | 52.2 | 51.6 | 48.4 | 44.7 | 50.8 | 46.6 | 46.1 | 44.7 |
| 4 | 40.6 | 45.3 | 47.0 | 46.2 | 46.2 | 46.7 | 41.2 | 44.1 | 44.5 | 40.9 | 45.0 | 44.6 |
| 5 | 52.9 | 48.9 | 47.3 | 59.6 | 59.6 | 57.8 | 53.4 | 46.6 | 55.8 | 54.4 | 50.3 | 47.8 |
| 6 | 41.1 | 51.1 | 48.9 | 46.8 | 46.8 | 41.4 | 42.0 | 48.6 | 42.1 | 43.3 | 44.9 | 46.0 |
| 7 | 64.5 | 44.7 | 45.5 | 54.1 | 54.1 | 52.7 | 64.9 | 44.6 | 51.1 | 61.8 | 51.5 | 51.7 |
| 8 | 47.0 | 50.0 | 45.2 | 50.5 | 50.5 | 48.6 | 50.0 | 47.9 | 47.4 | 48.4 | 46.2 | 48.3 |
| 9 | 49.7 | 46.9 | 53.0 | 49.7 | 49.7 | 48.7 | 50.2 | 46.8 | 48.5 | 49.7 | 48.2 | 46.8 |
| 10 | 50.8 | 47.5 | 46.6 | 52.9 | 52.9 | 51.1 | 50.8 | 46.6 | 49.2 | 50.0 | 47.7 | 47.5 |
| 11 | 45.6 | 48.3 | 51.6 | 48.5 | 48.5 | 47.2 | 49.8 | 46.2 | 46.5 | 49.2 | 46.7 | 45.5 |
| 12 | 46.7 | 46.2 | 61.1 | 47.7 | 47.7 | 50.3 | 44.8 | 41.1 | 49.0 | 46.0 | 47.7 | 45.5 |
| 13 | 61.5 | 43.6 | 42.8 | 52.4 | 52.4 | 51.0 | 61.1 | 43.7 | 49.7 | 61.1 | 52.8 | 52.0 |
| 14 | 49.7 | 45.5 | 50.0 | 53.5 | 53.5 | 53.4 | 50.8 | 45.1 | 50.3 | 52.3 | 51.8 | 51.0 |
| 15 | 47.3 | 46.3 | 50.5 | 51.6 | 51.6 | 52.1 | 47.9 | 45.5 | 49.7 | 49.0 | 47.8 | 48.8 |
| 16 | 50.3 | 47.9 | 50.0 | 65.8 | 65.8 | 59.3 | 53.1 | 47.2 | 56.8 | 53.8 | 51.5 | 52.5 |
| 17 | 58.3 | 46.6 | 44.8 | 55.6 | 55.6 | 56.2 | 58.9 | 43.9 | 54.2 | 55.9 | 61.5 | 61.8 |
| 18 | 40.7 | 44.6 | 54.2 | 46.6 | 46.6 | 45.9 | 41.4 | 41.5 | 42.9 | 42.8 | 43.1 | 42.7 |
| 19 | 58.0 | 42.6 | 49.5 | 58.7 | 58.7 | 91.2 | 54.4 | 44.8 | 81.9 | 53.5 | 55.3 | 55.2 |
| 20 | 42.0 | 44.9 | 60.1 | 43.5 | 43.5 | 47.4 | 41.3 | 42.6 | 46.0 | 41.3 | 43.5 | 43.9 |
| 21 | 41.6 | 44.7 | 60.5 | 43.1 | 43.1 | 45.8 | 40.0 | 41.4 | 43.3 | 41.4 | 44.9 | 44.9 |
| 22 | 55.7 | 49.0 | 45.9 | 52.3 | 52.3 | 52.3 | 56.3 | 46.0 | 52.1 | 55.0 | 60.9 | 62.5 |
| 23 | 58.0 | 47.4 | 45.9 | 54.7 | 54.7 | 55.2 | 58.1 | 46.2 | 52.3 | 58.2 | 62.2 | 61.8 |
| 24 | 97.2 | 37.2 | 41.8 | 56.7 | 56.7 | 57.3 | 81.1 | 40.3 | 56.3 | 80.9 | 57.1 | 55.5 |
| 25 | | 37.2 | 42.8 | 57.2 | 57.2 | 56.8 | 82.2 | 40.8 | 56.3 | 81.4 | 55.6 | 54.5 |
| 26 | 56.4 | | 43.5 | 44.7 | 44.7 | 43.2 | 39.0 | 69.5 | 42.2 | 40.8 | 44.1 | 43.7 |
| 27 | 62.8 | 56.7 | | 46.6 | 46.6 | 49.1 | 41.6 | 41.6 | 49.5 | 40.7 | 46.2 | 45.7 |
| 28 | 67.0 | 60.4 | 63.7 | | 100.0 | 59.7 | 55.9 | 43.8 | 57.1 | 58.0 | 52.3 | 53.0 |
| 29 | 67.0 | 60.4 | 63.7 | 100.0 | | 59.7 | 55.9 | 43.8 | 57.1 | 58.0 | 52.3 | 53.0 |
| 30 | 72.0 | 60.4 | 68.1 | 71.4 | 71.4 | | 55.2 | 45.2 | 83.9 | 55.2 | 54.5 | 54.9 |
| 31 | 89.7 | 56.5 | 60.3 | 71.2 | 71.2 | 71.7 | | 40.6 | 54.7 | 83.6 | 56.2 | 56.9 |
| 32 | 54.9 | 75.0 | 54.3 | 60.3 | 60.3 | 59.8 | 58.2 | | 43.7 | 38.7 | 44.1 | 44.4 |
| 33 | 70.1 | 59.4 | 64.2 | 70.1 | 70.1 | 88.8 | 71.1 | 58.8 | | 54.0 | 51.9 | 50.5 |
| 34 | 89.9 | 55.9 | 58.0 | 67.0 | 67.0 | 68.6 | 93.1 | 55.3 | 69.1 | | 57.2 | 57.6 |
| 35 | 66.7 | 57.3 | 59.4 | 64.1 | 64.1 | 67.7 | 67.7 | 57.3 | 66.1 | 68.8 | | 81.7 |
| 36 | 64.3 | 54.6 | 57.1 | 63.3 | 63.3 | 67.3 | 67.3 | 57.7 | 66.3 | 65.8 | 87.2 | |
| 37 | 65.0 | 55.8 | 59.9 | 64.0 | 64.0 | 65.5 | 67.0 | 56.3 | 64.5 | 68.5 | 93.4 | 89.3 |
| 38 | 53.4 | 58.0 | 54.8 | 54.3 | 54.3 | 60.3 | 53.9 | 55.7 | 55.7 | 53.9 | 57.1 | 55.3 |
| 39 | 51.1 | 52.4 | 50.2 | 52.8 | 52.8 | 53.2 | 52.4 | 53.2 | 52.8 | 52.4 | 54.9 | 55.4 |
| 40 | 51.0 | 55.2 | 52.7 | 49.0 | 49.0 | 50.6 | 54.0 | 52.3 | 50.6 | 49.8 | 55.6 | 54.4 |
| 41 | 52.3 | 56.0 | 51.9 | 49.4 | 49.4 | 52.3 | 52.3 | 51.0 | 50.6 | 50.2 | 55.1 | 53.1 |
| 42 | 42.3 | 56.9 | 42.3 | 45.2 | 45.2 | 45.6 | 44.8 | 74.2 | 45.6 | 43.5 | 45.6 | 47.6 |
| 43 | 34.3 | 45.1 | 34.9 | 36.8 | 36.8 | 35.6 | 36.8 | 58.4 | 36.2 | 36.5 | 37.8 | 37.1 |

| | 37 | 38 | 39 | 40 | 41 | 42 | 43 |
|---|---|---|---|---|---|---|---|
| 1 | 48.5 | 42.4 | 39.1 | 37.3 | 37.8 | 34.8 | 28.1 |
| 2 | 50.3 | 44.6 | 41.0 | 41.7 | 40.7 | 37.5 | 30.5 |
| 3 | 43.4 | 42.5 | 39.1 | 38.3 | 37.9 | 33.7 | 27.0 |
| 4 | 42.9 | 38.2 | 35.2 | 34.6 | 35.0 | 35.1 | 28.9 |
| 5 | 47.8 | 41.5 | 39.5 | 37.7 | 38.6 | 35.6 | 28.4 |
| 6 | 43.3 | 40.3 | 36.5 | 36.0 | 35.0 | 37.1 | 29.8 |
| 7 | 52.2 | 37.2 | 35.0 | 34.2 | 34.3 | 33.9 | 27.8 |
| 8 | 44.3 | 43.4 | 37.6 | 37.4 | 37.1 | 38.1 | 30.7 |
| 9 | 46.1 | 42.1 | 39.5 | 41.0 | 39.9 | 37.2 | 30.9 |
| 10 | 47.8 | 39.8 | 37.0 | 36.9 | 37.4 | 36.4 | 30.0 |
| 11 | 44.6 | 42.5 | 39.5 | 39.7 | 37.9 | 36.8 | 30.3 |
| 12 | 47.0 | 40.0 | 39.1 | 36.8 | 36.6 | 32.7 | 27.6 |
| 13 | 49.8 | 37.8 | 39.7 | 37.4 | 36.3 | 33.9 | 27.4 |
| 14 | 52.0 | 40.3 | 37.0 | 37.6 | 36.6 | 34.6 | 29.3 |
| 15 | 50.7 | 40.9 | 39.7 | 37.9 | 38.3 | 35.3 | 28.3 |
| 16 | 49.8 | 42.9 | 41.1 | 38.4 | 37.7 | 37.0 | 29.6 |
| 17 | 59.5 | 38.5 | 38.0 | 36.2 | 36.7 | 34.1 | 27.1 |
| 18 | 43.5 | 39.7 | 36.2 | 37.2 | 38.8 | 34.7 | 28.9 |
| 19 | 55.0 | 42.7 | 39.8 | 36.1 | 36.7 | 34.7 | 26.9 |
| 20 | 43.4 | 38.9 | 37.3 | 37.5 | 37.9 | 35.7 | 29.2 |
| 21 | 42.8 | 38.2 | 39.5 | 38.2 | 37.0 | 34.3 | 28.0 |
| 22 | 59.0 | 40.8 | 40.7 | 37.7 | 38.2 | 34.7 | 28.9 |
| 23 | 61.7 | 38.8 | 40.1 | 38.2 | 38.7 | 35.6 | 28.7 |
| 24 | 55.7 | 37.2 | 37.1 | 34.3 | 35.0 | 31.6 | 26.6 |
| 25 | 55.2 | 37.7 | 37.1 | 34.3 | 34.4 | 31.3 | 26.6 |
| 26 | 42.2 | 46.8 | 43.8 | 46.3 | 45.1 | 53.3 | 42.2 |
| 27 | 46.5 | 39.5 | 39.9 | 39.7 | 39.1 | 33.3 | 27.8 |
| 28 | 52.2 | 41.9 | 42.7 | 39.3 | 38.2 | 34.9 | 29.2 |
| 29 | 52.2 | 41.9 | 42.7 | 39.3 | 38.2 | 34.9 | 29.2 |
| 30 | 54.1 | 43.4 | 41.6 | 36.4 | 38.3 | 35.4 | 27.6 |
| 31 | 53.9 | 41.3 | 39.0 | 37.2 | 35.7 | 31.7 | 27.0 |
| 32 | 42.0 | 45.4 | 44.1 | 43.6 | 42.6 | 74.2 | 58.4 |
| 33 | 51.6 | 41.3 | 37.1 | 35.7 | 36.6 | 34.4 | 27.7 |
| 34 | 57.3 | 39.0 | 36.9 | 33.6 | 34.4 | 30.2 | 25.9 |
| 35 | 88.8 | 40.9 | 40.7 | 39.0 | 39.3 | 34.3 | 28.2 |
| 36 | 81.6 | 41.6 | 41.0 | 38.8 | 39.8 | 34.2 | 28.7 |
| 37 | | 43.4 | 41.4 | 39.0 | 39.5 | 34.4 | 27.8 |
| 38 | 58.0 | | 64.4 | 58.6 | 58.5 | 37.9 | 30.8 |
| 39 | 56.7 | 73.4 | | 72.2 | 73.7 | 40.4 | 32.9 |
| 40 | 55.6 | 68.6 | 81.6 | | 95.1 | 41.1 | 35.2 |
| 41 | 53.5 | 67.5 | 81.5 | 95.9 | | 41.1 | 36.1 |
| 42 | 46.0 | 51.6 | 54.8 | 54.8 | 56.5 | | 73.0 |
| 43 | 36.5 | 41.9 | 45.1 | 46.7 | 48.6 | 74.3 | |

### 3.4 TPS, TPP and TPS-TPP Polypeptide

[0542] Global percentages of similarity and identity between full length polypeptide sequences useful in performing the methods of the invention were determined using one of the methods available in the art, the MatGAT (Matrix Global Alignment Tool) software (BMC Bioinformatics. 2003 4:29. MatGAT: an application that generates similarity/identity matrices using protein or DNA sequences. Campanella J J, Bitincka L, Smalley J; software hosted by Ledion Bitincka). MatGAT software generates similarity/identity matrices for DNA or protein sequences without needing pre-alignment of the data. The program performs a series of pair-wise alignments using the Myers and Miller global alignment algorithm (with a gap opening penalty of 12, and a gap extension penalty of 2), calculates similarity and identity using for example Blosum 62 (for polypeptides), and then places the results in a distance matrix. Sequence similarity is shown in the bottom half of the dividing line and sequence identity is shown in the top half of the diagonal dividing line.

[0543] Parameters used in the comparison were: Scoring matrix: Blosum62, First Gap: 12, Extending Gap: 2.

TABLE B4
MatGAT results for global similarity and identity over the full length of TPS, TPP
and TPS-TPP polypeptide sequences.

| Polypeptide number | 3 | 5 | 8 | 9 | 12 | 22 | 47 | 48 | 52 | 65 | 73 | 74 | 75 | 76 | 85 | 89 |
|---|---|---|---|---|---|---|---|---|---|---|---|---|---|---|---|---|
| 3 | | 65.0 | 71.0 | 60.0 | 29.0 | 29.0 | 29.0 | 28.0 | 11.0 | 10.0 | 12.0 | 12.0 | 11.0 | 12.0 | 11.0 | 13.0 |
| 5 | | | 50.0 | 46.0 | 23.0 | 21.0 | 21.0 | 21.0 | 18.0 | 30.0 | 19.0 | 20.0 | 18.0 | 17.0 | 15.0 | 17.0 |
| 8 | | | | 61.0 | 28.0 | 29.0 | 30.0 | 29.0 | 13.0 | 10.0 | 11.0 | 11.0 | 11.0 | 14.0 | 9.0 | 13.0 |
| 9 | | | | | 27.0 | 29.0 | 30.0 | 28.0 | 12.0 | 11.0 | 10.0 | 11.0 | 11.0 | 13.0 | 9.0 | 13.0 |
| 12 | | | | | | 30.0 | 29.0 | 29.0 | 16.0 | 13.0 | 13.0 | 14.0 | 14.0 | 15.0 | 12.0 | 16.0 |
| 22 | | | | | | | 64.0 | 52.0 | 13.0 | 13.0 | 13.0 | 13.0 | 12.0 | 13.0 | 10.0 | 12.0 |
| 47 | | | | | | | | 50.0 | 12.0 | 13.0 | 12.0 | 11.0 | 12.0 | 13.0 | 10.0 | 12.0 |
| 48 | | | | | | | | | 13.0 | 11.0 | 12.0 | 12.0 | 12.0 | 13.0 | 10.0 | 12.0 |
| 52 | | | | | | | | | | 50.0 | 47.0 | 51.0 | 52.0 | 45.0 | 44.0 | 49.0 |
| 65 | | | | | | | | | | | 58.0 | 60.0 | 59.0 | 50.0 | 49.0 | 51.0 |
| 73 | | | | | | | | | | | | 68.0 | 57.0 | 51.0 | 49.0 | 52.0 |
| 74 | | | | | | | | | | | | | 62.0 | 51.0 | 49.0 | 55.0 |
| 75 | | | | | | | | | | | | | | 53.0 | 54.0 | 58.0 |
| 76 | | | | | | | | | | | | | | | 46.0 | 70.0 |
| 85 | | | | | | | | | | | | | | | | 52.0 |
| 89 | | | | | | | | | | | | | | | | |

| Polypeptide number | Name polypeptide |
|---|---|
| 3. | A. thaliana_AT1G78580.1#1_Class-I |
| 5. | A. thaliana_DNTPS1-TPPB |
| 8. | S. bicolor_Sb09g025790.1#1_Class-I |
| 9. | S. lepidophylla_U96736#1_Class-I |
| 12. | A. dehalogenans_YP_463663.1_BAC_Fusion |
| 22. | A. thaliana_AT1G06410.1#1_Class-II |
| 47. | Z. mays_ZM07MC29609_BFb0010E24@29519#1_Class-II |
| 48. | Z. mays_ZM07MC36251_BFb0274J14@36138#1_Class-II |
| 52. | G. max_GM06MC27748_sae81b02@27120#1_Class-III-A |
| 65. | A. thaliana_AT1G78090.1#1_Class-III-B |
| 73. | G. max_GM06MC01001_47125400@994#1_Class-III-B |
| 74. | G. max_GM06MC02336_48986355@2319#1_Class-III-B |
| 75. | G. max_GM06MC07245_50736990@7181#1_Class-III-B |
| 76. | H. vulgare_c62965763hv270303@10320#1_Class-III-B |
| 85. | T. aestivum_TA06MC06019_54656424@6005#1_Class-III-B |
| 89. | Z. mays_ZM07MC27735_BFb0207C15@27651#1_Class-III-B |

### Example 4

### Identification of Domains Comprised in Polypeptide Sequences Useful in Performing the Methods of the Invention

### 4.1 CLC-Like Polypeptides

[0544] The Integrated Resource of Protein Families, Domains and Sites (InterPro) database is an integrated interface for the commonly used signature databases for text- and sequence-based searches. The InterPro database combines these databases, which use different methodologies and varying degrees of biological information about well-characterized proteins to derive protein signatures. Collaborating databases include SWISS-PROT, PROSITE, TrEMBL, PRINTS, Propom and Pfam, Smart and TIGRFAMs. Pfam is a large collection of multiple sequence alignments and hidden Markov models covering many common protein domains and families. Pfam is hosted at the Sanger Institute server in the United Kingdom. Interpro is hosted at the European Bioinformatics Institute in the United Kingdom.

[0545] The results of the InterPro scan of the polypeptide sequence as represented by SEQ ID NO: 2 are presented in Table C1.

TABLE C1
InterPro scan results (major accession numbers) of the
polypeptide sequence as represented by SEQ ID NO: 2.

| | Accession | Accession | Amino acid coordinates |
|---|---|---|---|
| Database | number | name | on SEQ ID NO 2 |
| InterPro | IPR000644 | Cystathionine beta- | |
| | | synthase, core | |
| HMMPfam | PF00571 | CBS | T[604-769] 5.5e−08 |
| InterPro | IPR001807 | Chloride channel, voltage | |
| | | gated | |
| FPrintScan | PR00762 | CLCHANNEL | T[166-183] 2e−60 |
| | | | T[197-216] 2e−60 |
| | | | T[261-280] 2e−60 |
| | | | T[486-506] 2e−60 |
| | | | T[518-534] 2e−60 |
| | | | T[536-555] 2e−60 |
| | | | T[574-588] 2e−60 |
| HMMPanther | PTHR11689 | CHLORIDE CHANNEL | T[33-429] 0 |
| | | | T[447-780] 0 |
| InterPro | IPR002251 | Chloride channel plant | |
| | | CLC | |
| FPrintScan | PR01120 | CLCHANNELPLT | T[71-79] 1.9e−18 |
| | | | T[282-290] 1.9e−18 |
| | | | T[296-306] 1.9e−18 |
| | | | T[314-321] 1.9e−18 |
| | | | T[438-454] 1.9e−18 |
| InterPro | IPR014743 | Chloride channel, core | |
| Gene3D | G3DSA:1.10.3080.10 | no description | T[79-595] 4.6e−93 |
| HMMPfam | PF00654 | Voltage_CLC | T[149-571] 5.1e−165 |
| superfamily | SSF81340 | Clc chloride channel | T[74-591] 2.4e−93 |
| InterPro | NULL | NULL | |
| HMMPanther | PTHR11689:SF11 | CHLORIDE CHANNEL | T[33-429] 0 |
| | | CLC, PLANT | T[447-780] 0 |

[0546] Furthermore, CLC-like polypeptides are located in the membrane. When analysed with TMHMM (Krogh et al., Journal of Molecular Biology, 305(3):567-580, January 2001; Sonnhammer et al., In J. Glasgow, T. Littlejohn, F. Major, R. Lathrop, D. Sankoff, and C. Sensen, editors, Proceedings of the Sixth International Conference on Intelligent Systems for Molecular Biology, pages 175-182, Menlo Park, Calif., 1998. AAAI Press), SEQ ID NO: 2 is predicted to have 8 transmembrane domains.

# CLC-LIKE Length: 783
# CLC-LIKE Number of predicted TMHs: 8
# CLC-LIKE Exp number of AAs in TMHs: 208.85297
# CLC-LIKE Exp number, first 60 AAs: 0.00364
# CLC-LIKE Total prob of N-in: 0.07922

| | | | | |
|---|---|---|---|---|
| CLC-LIKE | TMHMM2.0 | outside | 1 | 97 |
| CLC-LIKE | TMHMM2.0 | TMhelix | 98 | 120 |
| CLC-LIKE | TMHMM2.0 | inside | 121 | 140 |
| CLC-LIKE | TMHMM2.0 | TMhelix | 141 | 163 |
| CLC-LIKE | TMHMM2.0 | outside | 164 | 254 |
| CLC-LIKE | TMHMM2.0 | TMhelix | 255 | 277 |
| CLC-LIKE | TMHMM2.0 | inside | 278 | 289 |
| CLC-LIKE | TMHMM2.0 | TMhelix | 290 | 309 |
| CLC-LIKE | TMHMM2.0 | outside | 310 | 339 |
| CLC-LIKE | TMHMM2.0 | TMhelix | 340 | 362 |
| CLC-LIKE | TMHMM2.0 | inside | 363 | 381 |
| CLC-LIKE | TMHMM2.0 | TMhelix | 382 | 404 |
| CLC-LIKE | TMHMM2.0 | outside | 405 | 469 |
| CLC-LIKE | TMHMM2.0 | TMhelix | 470 | 492 |
| CLC-LIKE | TMHMM2.0 | inside | 493 | 538 |
| CLC-LIKE | TMHMM2.0 | TMhelix | 539 | 561 |
| CLC-LIKE | TMHMM2.0 | outside | 562 | 783 |

### 4.2 OsBURP-Like Polypeptides

[0547] The Integrated Resource of Protein Families, Domains and Sites (InterPro) database is an integrated interface for the commonly used signature databases for text- and sequence-based searches. The InterPro database combines these databases, which use different methodologies and varying degrees of biological information about well-characterized proteins to derive protein signatures. Collaborating databases include SWISS-PROT, PROSITE, TrEMBL, PRINTS, Propom and Pfam, Smart and TIGRFAMs. Pfam is a large collection of multiple sequence alignments and hidden Markov models covering many common protein domains and families. Pfam is hosted at the Sanger Institute server in the United Kingdom. Interpro is hosted at the European Bioinformatics Institute in the United Kingdom.

[0548] The results of the InterPro scan of the polypeptide sequence as represented by SEQ ID NO: 95 are presented in Table C2.

TABLE C2
InterPro scan results (major accession numbers) of the
polypeptide sequence as represented by SEQ ID NO: 95.

| | Accession | Accession | Amino acid coordinates |
|---|---|---|---|
| Database | number | name | on SEQ ID NO 95 |
| InterPro | PR004873 | BURP | |
| HMMPfam | PF03181 | BURP | T[65-287] 1.5000E−70 |

### 4.3 AP2/ERF-Like Polypeptides

[0549] The Integrated Resource of Protein Families, Domains and Sites (InterPro) database is an integrated interface for the commonly used signature databases for text- and sequence-based searches. The InterPro database combines these databases, which use different methodologies and varying degrees of biological information about well-characterized proteins to derive protein signatures. Collaborating databases include SWISS-PROT, PROSITE, TrEMBL, PRINTS, Propom and Pfam, Smart and TIGRFAMs. Pfam is a large collection of multiple sequence alignments and hidden Markov models covering many common protein domains and families. Pfam is hosted at the Sanger Institute server in the United Kingdom. Interpro is hosted at the European Bioinformatics Institute in the United Kingdom.

[0550] The results of the InterPro scan of the polypeptide sequence as represented by SEQ ID NO: 160 are presented in Table C3.

TABLE C3
InterPro scan results (major accession numbers) of the
polypeptide sequence as represented by SEQ ID NO: 160.

| Database | Accession number | Accession name |
|---|---|---|
| IPR001471 | PF00847 | AP2 |

### 4.4 TPS, TPP and TPS-TPP Polypeptide

[0551] The Integrated Resource of Protein Families, Domains and Sites (InterPro) database is an integrated interface for the commonly used signature databases for text- and sequence-based searches. The InterPro database combines these databases, which use different methodologies and varying degrees of biological information about well-characterized proteins to derive protein signatures. Collaborating databases include SWISS-PROT, PROSITE, TrEMBL, PRINTS, Propom and Pfam, Smart and TIGRFAMs. Pfam is a large collection of multiple sequence alignments and hidden Markov models covering many common protein domains and families. Pfam is hosted at the Sanger Institute server in the United Kingdom. Interpro is hosted at the European Bioinformatics Institute in the United Kingdom.

[0552] The results of the InterPro scan of the polypeptide sequence as represented by TPS-TPP polypeptide A.thaliana_DNTPS1-TPP (SEQ ID NO: 441) are presented in Table C4.

TABLE C4
InterPro scan results (major accession numbers) of the
polypeptide sequence as represented by SEQ ID NO: 441.

| | | | Evalue [amino acid |
|---|---|---|---|
| Method | Domain ID and name | Short Name | coordinates] |
| PFAM | PF0098 | Glyco_transf_20 | 3.9e−288 [6-473]T |
| | Glycosyl transferase, | | |
| | family 20 | | |
| PFAM | PF02358 | Trehalose_PPase | 1.9e−92 [517-757]T |
| | Trehalose- | | 2.4e−111 [980-1213]T |
| | phosphatase | | |
| TIGRFAMs | TIGR00685 | T6PP: trehalose- | 7e−45 [974-1224]T |
| | T6PP: trehalose- | phosphatase | |
| | phosphatase | | |
| TIGRFAMs | TIGR01484 | HAD-SF-IIB: HAD- | 1.1e−21 [978-1191]T |
| | HAD-superfamily | superfamily | |
| | hydrolase, subfamily | hydrolase, subf | |
| | IIB | | |
| TIGRFAMs | TIGR02400 | trehalose_OtsA: | 2.4e−299 [7-473]T |
| | Alpha, alpha- | alpha, alpha- | |
| | trehalose-phosphate | trehalose-phosp | |
| | synthase | | |
| GENE3D | G3DSA:3.40.50.1000 | | 2.9e−38 [976-1222]T |
| | no description | | |
| GENE3D | G3DSA:3.40.50.2000 | | 9.7e−80 [12-267]T |
| | no description | | |
| PANTHER | PTHR10788 | TREHALOSE-6- | 6.6e−228 [70-798]T |
| | TREHALOSE-6- | PHOSPHATE | |
| | PHOSPHATE | SYNTHASE | |
| | SYNTHASE | | |
| SUPERFAMILY | SSF53756 | UDP- | 5.1e−163 [6-477]T |
| | UDP- | Glycosyltransferase/ | |
| | Glycosyltransferase/ | glycogen | |
| | glycogen | phosphorylase | |
| | phosphorylase | | |
| SUPERFAMILY | SSF56784 | HAD-like | 4.2e−49 [977-1230]T |
| | HAD-like | | 5.2e−26 [504-709]T |
| | | | 0.019 [821-850]T |

### Example 5

### Topology Prediction of the Polypeptide Sequences Useful in Performing the Methods of Invention

### 5.1 CLC-Like Polypeptides

[0553] TargetP 1.1 predicts the subcellular location of eukaryotic proteins. The location assignment is based on the predicted presence of any of the N-terminal pre-sequences: chloroplast transit peptide (cTP), mitochondrial targeting peptide (mTP) or secretory pathway signal peptide (SP). Scores on which the final prediction is based are not really probabilities, and they do not necessarily add to one. However, the location with the highest score is the most likely according to TargetP, and the relationship between the scores (the reliability class) may be an indication of how certain the prediction is. The reliability class (RC) ranges from 1 to 5, where 1 indicates the strongest prediction. TargetP is maintained at the server of the Technical University of Denmark.

[0554] For the sequences predicted to contain an N-terminal presequence a potential cleavage site can also be predicted.

[0555] A number of parameters were selected, such as organism group (non-plant or plant), cutoff sets (none, predefined set of cutoffs, or user-specified set of cutoffs), and the calculation of prediction of cleavage sites (yes or no).

[0556] The results of TargetP 1.1 analysis of the polypeptide sequence as represented by SEQ ID NO: 2 are presented Table D1. The “plant” organism group has been selected, no cutoffs defined, and the predicted length of the transit peptide requested. The subcellular localization of the polypeptide sequence as represented by SEQ ID NO: 2 is likely not the chloroplast or the mitochondrion. Given the homology to AtCLCa, the subcellular localisation may be the tonoplast.

TABLE D1
TargetP 1.1 analysis of the polypeptide sequence as represented by
SEQ ID NO: 2

| Name | Len | cTP | mTP | SP | other | Loc | RC | TPlen |
|---|---|---|---|---|---|---|---|---|
| SEQ ID NO: 2 | 783 | 0.236 | 0.081 | 0.107 | 0.898 | — | 2 | — |
| cutoff | | 0.000 | 0.000 | 0.000 | 0.000 | | | |

Abbreviations:
Len, Length;
cTP, Chloroplastic transit peptide;
mTP, Mitochondrial transit peptide,
SP, Secretory pathway signal peptide,
other, Other subcellular targeting,
Loc, Predicted Location;
RC, Reliability class;
TPlen, Predicted transit peptide length.

[0557] Many other algorithms can be used to perform such analyses, including:
[0558] ChloroP 1.1 hosted on the server of the Technical University of Denmark;
[0559] Protein Prowler Subcellular Localisation Predictor version 1.2 hosted on the server of the Institute for Molecular Bioscience, University of Queensland, Brisbane, Australia;
[0560] PENCE Proteome Analyst PA-GOSUB 2.5 hosted on the server of the University of Alberta, Edmonton, Alberta, Canada;
[0561] TMHMM, hosted on the server of the Technical University of Denmark
[0562] PSORT (URL: psort.org)
[0563] PLOC (Park and Kanehisa, Bioinformatics, 19, 1656-1663, 2003).

### 5.2 OsBURP-Like Polypeptides

[0564] TargetP 1.1 predicts the subcellular location of eukaryotic proteins. The location assignment is based on the predicted presence of any of the N-terminal pre-sequences: chloroplast transit peptide (cTP), mitochondrial targeting peptide (mTP) or secretory pathway signal peptide (SP). Scores on which the final prediction is based are not really probabilities, and they do not necessarily add to one. However, the location with the highest score is the most likely according to TargetP, and the relationship between the scores (the reliability class) may be an indication of how certain the prediction is. The reliability class (RC) ranges from 1 to 5, where 1 indicates the strongest prediction. TargetP is maintained at the server of the Technical University of Denmark.

[0565] For the sequences predicted to contain an N-terminal presequence a potential cleavage site can also be predicted.

[0566] A number of parameters were selected, such as organism group (non-plant or plant), cutoff sets (none, predefined set of cutoffs, or user-specified set of cutoffs), and the calculation of prediction of cleavage sites (yes or no).

[0567] The results of TargetP 1.1 analysis of the polypeptide sequence as represented by SEQ ID NO: 95 are presented Table D2. The “plant” organism group has been selected, no cutoffs defined, and the predicted length of the transit peptide requested. The OsBURP-like protein represented by SEQ ID NO: 95 is predicted to be secreted, with a putative signal peptide cleavage site between amino acids A21 and A22. Also in other OsBURP-like proteins, a secretion signal is postulated (Hattori et al., 1998).

TABLE D2
TargetP 1.1 analysis of the polypeptide sequence as represented by
SEQ ID NO: 95.

| Name | Len | cTP | mTP | SP | other | Loc | RC | TPlen |
|---|---|---|---|---|---|---|---|---|
| SEQ ID NO: 95 | 287 | 0.007 | 0.107 | 0.848 | 0.031 | S | 2 | 21 |
| cutoff | | 0.000 | 0.000 | 0.000 | 0.000 | | | |

Abbreviations:
Len, Length;
cTP, Chloroplastic transit peptide;
mTP, Mitochondrial transit peptide,
SP, Secretory pathway signal peptide,
other, Other subcellular targeting,
Loc, Predicted Location;
RC, Reliability class;
TPlen, Predicted transit peptide length.

[0568] Many other algorithms can be used to perform such analyses, including:
[0569] ChloroP 1.1 hosted on the server of the Technical University of Denmark;
[0570] Protein Prowler Subcellular Localisation Predictor version 1.2 hosted on the server of the Institute for Molecular Bioscience, University of Queensland, Brisbane, Australia;
[0571] PENCE Proteome Analyst PA-GOSUB 2.5 hosted on the server of the University of Alberta, Edmonton, Alberta, Canada;
[0572] TMHMM, hosted on the server of the Technical University of Denmark
[0573] PSORT (URL: psort.org)
[0574] PLOC (Park and Kanehisa, Bioinformatics, 19, 1656-1663, 2003).

### 5.3 AP2/ERF-Like Polypeptides

[0575] TargetP 1.1 predicts the subcellular location of eukaryotic proteins. The location assignment is based on the predicted presence of any of the N-terminal pre-sequences: chloroplast transit peptide (cTP), mitochondrial targeting peptide (mTP) or secretory pathway signal peptide (SP). Scores on which the final prediction is based are not really probabilities, and they do not necessarily add to one. However, the location with the highest score is the most likely according to TargetP, and the relationship between the scores (the reliability class) may be an indication of how certain the prediction is. The reliability class (RC) ranges from 1 to 5, where 1 indicates the strongest prediction. TargetP is maintained at the server of the Technical University of Denmark.

[0576] For the sequences predicted to contain an N-terminal presequence a potential cleavage site can also be predicted.

[0577] A number of parameters were selected, such as organism group (non-plant or plant), cutoff sets (none, predefined set of cutoffs, or user-specified set of cutoffs), and the calculation of prediction of cleavage sites (yes or no).

[0578] Many other algorithms can be used to perform such analyses, including:
[0579] ChloroP 1.1 hosted on the server of the Technical University of Denmark;
[0580] Protein Prowler Subcellular Localisation Predictor version 1.2 hosted on the server of the Institute for Molecular Bioscience, University of Queensland, Brisbane, Australia;
[0581] PENCE Proteome Analyst PA-GOSUB 2.5 hosted on the server of the University of Alberta, Edmonton, Alberta, Canada;
[0582] TMHMM, hosted on the server of the Technical University of Denmark
[0583] PSORT (URL: psort.org)
[0584] PLOC (Park and Kanehisa, Bioinformatics, 19, 1656-1663, 2003).

### 5.4 TPS, TPP and TPS-TPP Polypeptide

[0585] TargetP 1.1 predicts the subcellular location of eukaryotic proteins. The location assignment is based on the predicted presence of any of the N-terminal pre-sequences: chloroplast transit peptide (cTP), mitochondrial targeting peptide (mTP) or secretory pathway signal peptide (SP). Scores on which the final prediction is based are not really probabilities, and they do not necessarily add to one. However, the location with the highest score is the most likely according to TargetP, and the relationship between the scores (the reliability class) may be an indication of how certain the prediction is. The reliability class (RC) ranges from 1 to 5, where 1 indicates the strongest prediction. TargetP is maintained at the server of the Technical University of Denmark.

[0586] For the sequences predicted to contain an N-terminal presequence, a potential cleavage site can also be predicted.

[0587] A number of parameters is selected, such as organism group (non-plant or plant), cutoff sets (none, predefined set of cutoffs, or user-specified set of cutoffs), and the calculation of prediction of cleavage sites (yes or no).

[0588] Many other algorithms can alternatively be used to determine the subcelullar localisation of a protein, including:
[0589] ChloroP 1.1 hosted on the server of the Technical University of Denmark;
[0590] Protein Prowler Subcellular Localisation Predictor version 1.2 hosted on the server of the Institute for Molecular Bioscience, University of Queensland, Brisbane, Australia;
[0591] PENCE Proteome Analyst PA-GOSUB 2.5 hosted on the server of the University of Alberta, Edmonton, Alberta, Canada;
[0592] TMHMM, hosted on the server of the Technical University of Denmark
[0593] PSORT (URL: psort.org)
[0594] PLOC (Park and Kanehisa, Bioinformatics, 19, 1656-1663, 2003).

### Example 6

### Assay Related to the Polypeptide Sequences Useful in Performing the Methods of the Invention

### 6.1 CLC-Like Polypeptides

[0595] De Angeli (Nature 442, 939-942, 2006) has functionally characterised AtCLCa using the patch clamp technique on Arabidopsis mesophyl cells for measuring currents across the tonoplast. The patch clamp technique is well known in the art for studying ion channel activity in cells, see for example Hamill et al., Pflügers Archiv (European Journal of Physiology) 391, 85-100, 1981.

### 6.2 OBURP-Like Polypeptides

[0596] For transcript level analysis of OsBURP-like polypeptides under stress, plants are planted in plastic trays filled with sandy soil and placed in the greenhouse. Three-week old seedlings are prepared for abiotic stress treatments mainly according to Xiong and Yang (Plant Cell 2003, Vol. 15, pages 745-759). Drought stress is induced by withholding water from the trays, and seedling leaves are sampled at normal (before withholding water), slight drought [with the average relative water content (RWC) at about 90%], moderate drought (about half of leaves rolled, RWC at about 83%), and severe drought (all leaves completely rolled, RWC at about 70%) conditions. Seedling roots are submerged in 200 mM NaCl solution for salt stress, and seedling leaves are sampled at 0, 1, 6, and 12 h after the treatment. For ABA treatment, seedling leaves are sprayed with 0.1 mM ABA solution and sampled at 0, 10, 30 min, and 3 h after treatment. For cold stress, the seedlings are transferred into a growth chamber at 4° C. and sampled at 0, 1, 3, and 10 h after treatment.

[0597] Total RNA is extracted from plant samples using standard procedures. Gene specific primers are designed with standard methods, based on the sequences provided in the sequence listing. Real-time PCR is conducted using a household gene like Actin1 as internal standard and the relative expression levels are determined for example as described by Liang et al., Plant J 46:1059-1072, 2006.

### 6.3 AP2/ERF-Like Polypeptides

[0598] The functional assay for the AP2/ERF polypeptide is described in: Allen M D et al. EMBO J. 1998 Sep. 15; 17(18):5484-96.

### 6.4 TPS, TPP and TPS-TPP Polypeptide

### Concerning TPS Activity

[0599] Methods to determine enzymatic activity of TPS polypeptides are well known in the art. Typically the levels of Tre6P (trehalose 6-phosphate), which is the product of the reaction catalyzed by TPS are measured to infer the activity of the TPS enzyme. For example Lunn et al. (2006) in Biochem J. 397:139-148, described a novel method using LC-MS-Q3 able to measure with 100 fold higher sensitivity the level of Tre6P (trehalose 6-phosphate), in plants, the product of the reaction that TPS catalyzes. Blazquez et al. (1994) in FEMS Microbiol Lett. 121:223-227 described a procedure for the quantitative determination of trehalose 6-phosphate (T6P) based on its ability to inhibit hexokinase from Yarrowia lipolytica. Van Vaeck et al. (2001) in Biochem J. 353:157-162 described a method to determine the levels of Tre6P using B. substilis Phosphotrehalase enzymatic assay.

[0600] In vivo activity of TPS polypeptides may also be determined, for example through complementation assays in S. cerevisie (Blazquez et al (1998) in Plant J. 13:685-689).

### Concerning TPP Activity

[0601] Methods to determine enzymatic activity of TPP polypeptides are well known in the art. Typically the levels of Trehalose, which is the product of the reaction catalyzed by TPP are measured. For example a method using gas chromatography-mass spectrometry (GC-MS) analysis may be used such as the method described by Vogel et al. (1998) J. Exp. Bot. 52:1817-1826. Alternatively a method using trehalase may be used (Canovas et al. (2001). J. Bacteriol. 183:3365-337; Kienle et al. (1993). Yeast. 9:607-611).

[0602] Further alternative biochemical assays to determine TPP activity by measuring the amount of Pi released from Tre6P have been described (Kluuts et al. (2003). J. Biol. Chem. 278:2093-2100)

[0603] In vivo activity of TPP polypeptides may also be determined, for example through complementation assays in S. cerevisie (Shima et al. (2007). FEBS J. 274(5):1192-1201; Vogel et al. (1998). Plant J 13:673-83).

### Concerning TPS-TPP Activity

[0604] The TPS and TPP activity of a TPS-TPP polypeptide may be determined using any of the methods described below. Specific methods to measure TPS and TPP activity adapted to test the effect of the physical proximity of the TPS and TPP enzymes which catalyze a sequential reaction have been previously described (Seo et al. (2000). Applied and Environmental Microbiology. 66:2484-2490).

### Example 7

### Cloning of the Nucleic Acid Sequence Used in the Methods of the Invention

### 7.1 CLC-Like Polypeptides

[0605] The nucleic acid sequence was amplified by PCR using as template a custom-made Oryza sativa seedlings cDNA library (in pCMV Sport 6.0; Invitrogen, Paisley, UK). PCR was performed using Hifi Taq DNA polymerase in standard conditions, using 200 ng of template in a 50 μl PCR mix. The primers used were prm3490 (SEQ ID NO: 92; sense, start codon in bold): 5′-ggggacaagtttgtacaaaaaagcaggcttaaacaatggaggaggagcagagc-3′ and prm3491 (SEQ ID NO: 93; reverse, complementary): 5′-ggggaccactttgtacaagaaagctgggtctcaaaaa tggttcctctcaa-3′, which include the AttB sites for Gateway recombination. The amplified PCR fragment was purified also using standard methods. The first step of the Gateway procedure, the BP reaction, was then performed, during which the PCR fragment recombined in vivo with the pDONR201 plasmid to produce, according to the Gateway terminology, an “entry clone”, pCLC-like. Plasmid pDONR201 was purchased from Invitrogen, as part of the Gateway® technology.

[0606] The entry clone comprising SEQ ID NO: 1 was then used in an LR reaction with a destination vector used for Oryza sativa transformation. This vector contained as functional elements within the T-DNA borders: a plant selectable marker; a screenable marker expression cassette; and a Gateway cassette intended for LR in vivo recombination with the nucleic acid sequence of interest already cloned in the entry clone. A rice GOS2 promoter (SEQ ID NO: 91) for constitutive specific expression was located upstream of this Gateway cassette.

[0607] After the LR recombination step, the resulting expression vector pGOS2:CLC-like (FIG. 4) was transformed into Agrobacterium strain LBA4044 according to methods well known in the art.

### 7.2 OsBURP-Like Polypeptides

[0608] The nucleic acid sequence was amplified by PCR using as template a custom-made Oryza sativa seedlings cDNA library (in pCMV Sport 6.0; Invitrogen, Paisley, UK). PCR was performed using Hifi Taq DNA polymerase in standard conditions, using 200 ng of template in a 50 μl PCR mix. The primers used were prm13652 (SEQ ID NO: 157; sense, start codon in bold): 5′-ggggacaagtttgtacaaaaaagcaggcttaaacaatggctaggtctctcgctgct-3′ and prm13653 (SEQ ID NO: 158; reverse, complementary): 5′-ggggaccactttgtacaagaaagctgggtcgca ggtagctgcttcattca-3′, which include the AttB sites for Gateway recombination. The amplified PCR fragment was purified also using standard methods. The first step of the Gateway procedure, the BP reaction, was then performed, during which the PCR fragment recombined in vivo with the pDONR201 plasmid to produce, according to the Gateway terminology, an “entry clone”, pOsBURP-like. Plasmid pDONR201 was purchased from Invitrogen, as part of the Gateway® technology.

[0609] The entry clone comprising SEQ ID NO: 94 was then used in an LR reaction with a destination vector used for Oryza sativa transformation. This vector contained as functional elements within the T-DNA borders: a plant selectable marker; a screenable marker expression cassette; and a Gateway cassette intended for LR in vivo recombination with the nucleic acid sequence of interest already cloned in the entry clone. A rice GOS2 promoter (SEQ ID NO: 156) for constitutive specific expression was located upstream of this Gateway cassette.

[0610] After the LR recombination step, the resulting expression vector pGOS2OsBURP-like (FIG. 8) was transformed into Agrobacterium strain LBA4044 according to methods well known in the art.

### 7.3 AP2/ERF-Like Polypeptides

[0611] The nucleic acid sequence was amplified by PCR using as template a custom-made Arabidopsis thaliana seedlings cDNA library (in pCMV Sport 6.0; Invitrogen, Paisley, UK). PCR was performed using Hifi Taq DNA polymerase in standard conditions, using 200 ng of template in a 50 μl PCR mix. The primers used were prm14304 (SEQ ID NO: 270; sense, start codon in bold): 5′-ggggacaagtttgtacaaaaaagcaggcttaaacaatggacggtggaagagga-3′ and prm14305 (SEQ ID NO: 271; reverse, complementary): 5′-ggggaccactttgtacaagaaagctgggtt ccaatatcaattaacatccca-3′, which include the AttB sites for Gateway recombination. The amplified PCR fragment was purified also using standard methods. The first step of the Gateway procedure, the BP reaction, was then performed, during which the PCR fragment recombined in vivo with the pDONR201 plasmid to produce, according to the Gateway terminology, an “entry clone”, pAP2/ERF. Plasmid pDONR201 was purchased from Invitrogen, as part of the Gateway® technology.

[0612] The entry clone comprising SEQ ID NO: 159 was then used in an LR reaction with a destination vector used for Oryza sativa transformation. This vector contained as functional elements within the T-DNA borders: a plant selectable marker; a screenable marker expression cassette; and a Gateway cassette intended for LR in vivo recombination with the nucleic acid sequence of interest already cloned in the entry clone. A rice GOS2 promoter (SEQ ID NO: 269) for constitutive specific expression was located upstream of this Gateway cassette.

[0613] After the LR recombination step, the resulting expression vector pGOS2:AP2/ERF (FIG. 12) was transformed into Agrobacterium strain LBA4044 according to methods well known in the art.

### 7.4 TPS, TPP and TPS-TPP Polypeptide

[0614] Concerning TPS::TPP: (A.thaliana_DNTPS1-TPPB)

[0615] A clone comprising A.thaliana_DNTPSI-TPPB (SEQ ID NO: 440) has been previously described. The nucleic acid sequence was amplified by PCR using primers complementary to the 5′ and 3′ terminus of the coding sequence. The primers include the AttB sites for Gateway recombination. The amplified PCR fragment was purified also using standard methods. The first step of the Gateway procedure, the BP reaction, was then performed, during which the PCR fragment recombined in vivo with the pDONR201 plasmid to produce, according to the Gateway terminology, an “entry clone”, pA.thaliana_DNTPSI-TPPB. Plasmid pDONR201 was purchased from Invitrogen, as part of the Gateway® technology.

[0616] The entry clone comprising (SEQ ID NO: 440) was then used in an LR reaction with a destination vector used for Oryza sativa transformation. This vector additionally contained as functional elements within the T-DNA borders: a plant selectable marker; a screenable marker expression cassette; and a Gateway cassette intended for LR in vivo recombination with the nucleic acid sequence of interest already cloned in the entry clone. A rice GOS2 promoter (SEQ ID NO: 457) for constitutive specific expression was located upstream of this Gateway cassette.

[0617] After the LR recombination step, the resulting expression vector pGOS2:: A.thaliana_DNTPSI-TPPB fusion (FIG. 15) was transformed into Agrobacterium strain LBA4044 according to methods well known in the art.

Concerning TPS::TPP: S.cerevisiae_TPS1/TPS2_fusion

[0618] A clone comprising S.cerevisiae_TPS1/TPS2_fusion (SEQ ID NO: 442) has been previously described (Miranda et al. 2007 Planta 226:1411-21). The nucleic acid sequence was amplified by PCR using primers complementary to the 5′ and 3′ terminus of the coding sequence. The primers include the AttB sites for Gateway recombination. The amplified PCR fragment was purified also using standard methods. The first step of the Gateway procedure, the BP reaction, was then performed, during which the PCR fragment recombined in vivo with the pDONR201 plasmid to produce, according to the Gateway terminology, an “entry clone”, pS.cerevisiae_TPS1/TPS2_fusion. Plasmid pDONR201 was purchased from Invitrogen, as part of the Gateway® technology.

[0619] The entry clone comprising (SEQ ID NO: 442) was then used in an LR reaction with a destination vector used for Oryza sativa transformation. This vector additionally contained as functional elements within the T-DNA borders: a plant selectable marker; a screenable marker expression cassette; and a Gateway cassette intended for LR in vivo recombination with the nucleic acid sequence of interest already cloned in the entry clone. A rice GOS2 promoter (SEQ ID NO: 457) for constitutive specific expression was located upstream of this Gateway cassette.

[0620] After the LR recombination step, the resulting expression vector pGOS2:: S.cerevisiae_TPS1/TPS2_fusion (FIG. 15) was transformed into Agrobacterium strain LBA4044 according to methods well known in the art.

Concerning chloroplatic TPS::TPP: (S.cerevisiae_Chl.TPS1/TPS2_fusion)

[0621] A clone comprising S.cerevisiae_TPS1/TPS2_fusion gene (SEQ ID NO: 444) has been previously described (Miranda et al. 2007 Planta 226:1411-21). The nucleic acid sequence was amplified by PCR using primers complementary to the 5′ and 3′ terminus of the coding sequence. The primers include the AttB sites for Gateway recombination. The amplified PCR fragment was purified also using standard methods.

[0622] A nucleic acid molecule encoding the chloroplast transient peptide of the small subunit of the rubisco enzyme of Arabidopsis thaliana and comprising the sequence represented by (SEQ ID NO: 455) was synthesized chemically. SEQ ID NO: 455 encodes the targeting peptide represented by SEQ ID NO: 456. The nucleic acid encoding such transient polypeptide was ligated to the 5′ terminus of the PCR fragment comprising SEQ ID NO: 444 using standard procedures.

[0623] The first step of the Gateway procedure, the BP reaction, was then performed, during which the PCR fragment fused to the chloroplast signaling recombined in vivo with the pDONR201 plasmid to produce, according to the Gateway terminology, an “entry clone”, pS.cerevisiae_Chl.TPS1/TPS2_fusion. Plasmid pDONR201 was purchased from Invitrogen, as part of the Gateway® technology.

[0624] The entry clone comprising the fusion of the chloroplast targeting signalling and SEQ ID NO: 444 was then used in an LR reaction with a destination vector used for Oryza sativa transformation. This vector additionally contained as functional elements within the T-DNA borders: a plant selectable marker; a screenable marker expression cassette; and a Gateway cassette intended for LR in vivo recombination with the nucleic acid sequence of interest already cloned in the entry clone. A rice GOS2 promoter (SEQ ID NO: 457) for constitutive specific expression was located upstream of this Gateway cassette.

[0625] After the LR recombination step, the resulting expression vector pGOS2:: S.cerevisiae_Chl.TPS1/TPS2_fusion (FIG. 15) was transformed into Agrobacterium strain LBA4044 according to methods well known in the art.

### Example 8

### Plant Transformation

### Rice Transformation

[0626] The Agrobacterium containing the expression vector was used to transform Oryza sativa plants. Mature dry seeds of the rice japonica cultivar Nipponbare were dehusked. Sterilization was carried out by incubating for one minute in 70% ethanol, followed by 30 minutes in 0.2% HgCl₂, followed by a 6 times 15 minutes wash with sterile distilled water. The sterile seeds were then germinated on a medium containing 2,4-D (callus induction medium). After incubation in the dark for four weeks, embryogenic, scutellum-derived calli were excised and propagated on the same medium. After two weeks, the calli were multiplied or propagated by subculture on the same medium for another 2 weeks. Embryogenic callus pieces were sub-cultured on fresh medium 3 days before co-cultivation (to boost cell division activity).

[0627] Agrobacterium strain LBA4404 containing the expression vector was used for co-cultivation. Agrobacterium was inoculated on AB medium with the appropriate antibiotics and cultured for 3 days at 28° C. The bacteria were then collected and suspended in liquid co-cultivation medium to a density (OD₆₀₀) of about 1. The suspension was then transferred to a Petri dish and the calli immersed in the suspension for 15 minutes. The callus tissues were then blotted dry on a filter paper and transferred to solidified, co-cultivation medium and incubated for 3 days in the dark at 25° C. Co-cultivated calli were grown on 2,4-D-containing medium for 4 weeks in the dark at 28° C. in the presence of a selection agent. During this period, rapidly growing resistant callus islands developed. After transfer of this material to a regeneration medium and incubation in the light, the embryogenic potential was released and shoots developed in the next four to five weeks. Shoots were excised from the calli and incubated for 2 to 3 weeks on an auxin-containing medium from which they were transferred to soil. Hardened shoots were grown under high humidity and short days in a greenhouse.

[0628] Approximately 35 independent TO rice transformants were generated for one construct. The primary transformants were transferred from a tissue culture chamber to a greenhouse. After a quantitative PCR analysis to verify copy number of the T-DNA insert, only single copy transgenic plants that exhibit tolerance to the selection agent were kept for harvest of T1 seed. Seeds were then harvested three to five months after transplanting. The method yielded single locus transformants at a rate of over 50% (Aldemita and Hodges 1996, Chan et al. 1993, Hiei et al. 1994).

### Example 9

### Transformation of Other Crops

### Corn Transformation

[0629] Transformation of maize (Zea mays) is performed with a modification of the method described by Ishida et al. (1996) Nature Biotech 14(6): 745-50. Transformation is genotype-dependent in corn and only specific genotypes are amenable to transformation and regeneration. The inbred line A188 (University of Minnesota) or hybrids with A188 as a parent are good sources of donor material for transformation, but other genotypes can be used successfully as well. Ears are harvested from corn plant approximately 11 days after pollination (DAP) when the length of the immature embryo is about 1 to 1.2 mm. Immature embryos are cocultivated with Agrobacterium tumefaciens containing the expression vector, and transgenic plants are recovered through organogenesis. Excised embryos are grown on callus induction medium, then maize regeneration medium, containing the selection agent (for example imidazolinone but various selection markers can be used). The Petri plates are incubated in the light at 25° C. for 2-3 weeks, or until shoots develop. The green shoots are transferred from each embryo to maize rooting medium and incubated at 25° C. for 2-3 weeks, until roots develop. The rooted shoots are transplanted to soil in the greenhouse. T1 seeds are produced from plants that exhibit tolerance to the selection agent and that contain a single copy of the T-DNA insert.

### Wheat Transformation

[0630] Transformation of wheat is performed with the method described by Ishida et al. (1996) Nature Biotech 14(6): 745-50. The cultivar Bobwhite (available from CIMMYT, Mexico) is commonly used in transformation. Immature embryos are co-cultivated with Agrobacterium tumefaciens containing the expression vector, and transgenic plants are recovered through organogenesis. After incubation with Agrobacterium, the embryos are grown in vitro on callus induction medium, then regeneration medium, containing the selection agent (for example imidazolinone but various selection markers can be used). The Petri plates are incubated in the light at 25° C. for 2-3 weeks, or until shoots develop. The green shoots are transferred from each embryo to rooting medium and incubated at 25° C. for 2-3 weeks, until roots develop. The rooted shoots are transplanted to soil in the greenhouse. T1 seeds are produced from plants that exhibit tolerance to the selection agent and that contain a single copy of the T-DNA insert.

### Soybean Transformation

[0631] Soybean is transformed according to a modification of the method described in the Texas A&M U.S. Pat. No. 5,164,310. Several commercial soybean varieties are amenable to transformation by this method. The cultivar Jack (available from the Illinois Seed foundation) is commonly used for transformation. Soybean seeds are sterilised for in vitro sowing. The hypocotyl, the radicle and one cotyledon are excised from seven-day old young seedlings. The epicotyl and the remaining cotyledon are further grown to develop axillary nodes. These axillary nodes are excised and incubated with Agrobacterium tumefaciens containing the expression vector. After the cocultivation treatment, the explants are washed and transferred to selection media. Regenerated shoots are excised and placed on a shoot elongation medium. Shoots no longer than 1 cm are placed on rooting medium until roots develop. The rooted shoots are transplanted to soil in the greenhouse. T1 seeds are produced from plants that exhibit tolerance to the selection agent and that contain a single copy of the T-DNA insert.

### Rapeseed/Canola Transformation

[0632] Cotyledonary petioles and hypocotyls of 5-6 day old young seedling are used as explants for tissue culture and transformed according to Babic et al. (1998, Plant Cell Rep 17: 183-188). The commercial cultivar Westar (Agriculture Canada) is the standard variety used for transformation, but other varieties can also be used. Canola seeds are surface-sterilized for in vitro sowing. The cotyledon petiole explants with the cotyledon attached are excised from the in vitro seedlings, and inoculated with Agrobacterium (containing the expression vector) by dipping the cut end of the petiole explant into the bacterial suspension. The explants are then cultured for 2 days on MSBAP-3 medium containing 3 mg/l BAP, 3% sucrose, 0.7 Phytagar at 23° C., 16 hr light. After two days of co-cultivation with Agrobacterium, the petiole explants are transferred to MSBAP-3 medium containing 3 mg/l BAP, cefotaxime, carbenicillin, or timentin (300 mg/l) for 7 days, and then cultured on MSBAP-3 medium with cefotaxime, carbenicillin, or timentin and selection agent until shoot regeneration. When the shoots are 5-10 mm in length, they are cut and transferred to shoot elongation medium (MSBAP-0.5, containing 0.5 mg/l BAP). Shoots of about 2 cm in length are transferred to the rooting medium (MS0) for root induction. The rooted shoots are transplanted to soil in the greenhouse. T1 seeds are produced from plants that exhibit tolerance to the selection agent and that contain a single copy of the T-DNA insert.

### Alfalfa Transformation

[0633] A regenerating clone of alfalfa (Medicago sativa) is transformed using the method of (McKersie et al., 1999 Plant Physiol 119: 839-847). Regeneration and transformation of alfalfa is genotype dependent and therefore a regenerating plant is required. Methods to obtain regenerating plants have been described. For example, these can be selected from the cultivar Rangelander (Agriculture Canada) or any other commercial alfalfa variety as described by Brown DCW and A Atanassov (1985. Plant Cell Tissue Organ Culture 4: 111-112). Alternatively, the RA3 variety (University of Wisconsin) has been selected for use in tissue culture (Walker et al., 1978 Am J Bot 65:654-659). Petiole explants are cocultivated with an overnight culture of Agrobacterium tumefaciens C58C1 pMP90 (McKersie et al., 1999 Plant Physiol 119: 839-847) or LBA4404 containing the expression vector. The explants are cocultivated for 3 d in the dark on SH induction medium containing 288 mg/L Pro, 53 mg/L thioproline, 4.35 g/L K2SO4, and 100 μm acetosyringinone. The explants are washed in half-strength Murashige-Skoog medium (Murashige and Skoog, 1962) and plated on the same SH induction medium without acetosyringinone but with a suitable selection agent and suitable antibiotic to inhibit Agrobacterium growth. After several weeks, somatic embryos are transferred to BOi2Y development medium containing no growth regulators, no antibiotics, and 50 g/L sucrose. Somatic embryos are subsequently germinated on half-strength Murashige-Skoog medium. Rooted seedlings were transplanted into pots and grown in a greenhouse. T1 seeds are produced from plants that exhibit tolerance to the selection agent and that contain a single copy of the T-DNA insert.

### Cotton Transformation

[0634] Cotton is transformed using Agrobacterium tumefaciens according to the method described in U.S. Pat. No. 5,159,135. Cotton seeds are surface sterilised in 3% sodium hypochlorite solution during 20 minutes and washed in distilled water with 500 μg/ml cefotaxime. The seeds are then transferred to SH-medium with 50 μg/ml benomyl for germination. Hypocotyls of 4 to 6 days old seedlings are removed, cut into 0.5 cm pieces and are placed on 0.8% agar. An Agrobacterium suspension (approx. 108 cells per ml, diluted from an overnight culture transformed with the gene of interest and suitable selection markers) is used for inoculation of the hypocotyl explants. After 3 days at room temperature and lighting, the tissues are transferred to a solid medium (1.6 g/l Gelrite) with Murashige and Skoog salts with B5 vitamins (Gamborg et al., Exp. Cell Res. 50:151-158 (1968)), 0.1 mg/l 2,4-D, 0.1 mg/l 6-furfurylaminopurine and 750 μg/ml MgCL2, and with 50 to 100 μg/ml cefotaxime and 400-500 μg/ml carbenicillin to kill residual bacteria. Individual cell lines are isolated after two to three months (with subcultures every four to six weeks) and are further cultivated on selective medium for tissue amplification (30° C., 16 hr photoperiod). Transformed tissues are subsequently further cultivated on non-selective medium during 2 to 3 months to give rise to somatic embryos. Healthy looking embryos of at least 4 mm length are transferred to tubes with SH medium in fine vermiculite, supplemented with 0.1 mg/l indole acetic acid, 6 furfurylaminopurine and gibberellic acid. The embryos are cultivated at 30° C. with a photoperiod of 16 hrs, and plantlets at the 2 to 3 leaf stage are transferred to pots with vermiculite and nutrients. The plants are hardened and subsequently moved to the greenhouse for further cultivation.

### Example 10

### Phenotypic Evaluation Procedure

### 10.1 Evaluation Setup

[0635] Approximately 35 independent TO rice transformants were generated. The primary transformants were transferred from a tissue culture chamber to a greenhouse for growing and harvest of T1 seed. Six events, of which the T1 progeny segregated 3:1 for presence/absence of the transgene, were retained. For each of these events, approximately 10 T1 seedlings containing the transgene (hetero- and homo-zygotes) and approximately 10 T1 seedlings lacking the transgene (nullizygotes) were selected by monitoring visual marker expression. The transgenic plants and the corresponding nullizygotes were grown side-by-side at random positions. Greenhouse conditions were of shorts days (12 hours light), 28° C. in the light and 22° C. in the dark, and a relative humidity of 70%. Plants grown under non-stress conditions were watered at regular intervals to ensure that water and nutrients were not limiting and to satisfy plant needs.

[0636] From the stage of sowing until the stage of maturity the plants were passed several times through a digital imaging cabinet. At each time point digital images (2048×1536 pixels, 16 million colours) were taken of each plant from at least 6 different angles.

### Drought Screen

[0637] Plants from T2 seeds were grown in potting soil under normal conditions until they approached the heading stage. They were then transferred to a “dry” section where irrigation was withheld. Humidity probes were inserted in randomly chosen pots to monitor the soil water content (SWC). When SWC went below certain thresholds, the plants were automatically re-watered continuously until a normal level was reached again. The plants were then re-transferred again to normal conditions. The rest of the cultivation (plant maturation, seed harvest) was the same as for plants not grown under abiotic stress conditions. Growth and yield parameters were recorded as detailed for growth under normal conditions.

[0638] Nitrogen Use Efficiency Screen

[0639] Rice plants from T2 seeds are grown in potting soil under normal conditions except for the nutrient solution. The pots are watered from transplantation to maturation with a specific nutrient solution containing reduced N nitrogen (N) content, usually between 7 to 8 times less. The rest of the cultivation (plant maturation, seed harvest) is the same as for plants not grown under abiotic stress. Growth and yield parameters are recorded as detailed for growth under normal conditions.

### Salt Stress Screen

[0640] Plants are grown on a substrate made of coco fibers and argex (3 to 1 ratio). A normal nutrient solution is used during the first two weeks after transplanting the plantlets in the greenhouse. After the first two weeks, 25 mM of salt (NaCl) is added to the nutrient solution, until the plants are harvested. Seed-related parameters are then measured.

### 10.2 Statistical Analysis: F Test

[0641] A two factor ANOVA (analysis of variants) was used as a statistical model for the overall evaluation of plant phenotypic characteristics. An F test was carried out on all the parameters measured of all the plants of all the events transformed with the gene of the present invention. The F test was carried out to check for an effect of the gene over all the transformation events and to verify for an overall effect of the gene, also known as a global gene effect. The threshold for significance for a true global gene effect was set at a 5% probability level for the F test. A significant F test value points to a gene effect, meaning that it is not only the mere presence or position of the gene that is causing the differences in phenotype.

### 10.3 Parameters Measured

### Biomass-Related Parameter Measurement

[0642] From the stage of sowing until the stage of maturity the plants were passed several times through a digital imaging cabinet. At each time point digital images (2048×1536 pixels, 16 million colours) were taken of each plant from at least 6 different angles.

[0643] The plant aboveground area (or leafy biomass) was determined by counting the total number of pixels on the digital images from aboveground plant parts discriminated from the background. This value was averaged for the pictures taken on the same time point from the different angles and was converted to a physical surface value expressed in square mm by calibration. Experiments show that the aboveground plant area measured this way correlates with the biomass of plant parts above ground. The above ground area is the area measured at the time point at which the plant had reached its maximal leafy biomass. The early vigour is the plant (seedling) aboveground area three weeks post-germination. Increase in root biomass is expressed as an increase in total root biomass (measured as maximum biomass of roots observed during the lifespan of a plant); or as an increase in the root/shoot index (measured as the ratio between root mass and shoot mass in the period of active growth of root and shoot).

[0644] Early vigour was determined by counting the total number of pixels from aboveground plant parts discriminated from the background. This value was averaged for the pictures taken on the same time point from different angles and was converted to a physical surface value expressed in square mm by calibration. The results described below are for plants three weeks post-germination.

### Seed-Related Parameter Measurements

[0645] The mature primary panicles were harvested, counted, bagged, barcode-labelled and then dried for three days in an oven at 37° C. The panicles were then threshed and all the seeds were collected and counted. The filled husks were separated from the empty ones using an air-blowing device. The empty husks were discarded and the remaining fraction was counted again. The filled husks were weighed on an analytical balance. The number of filled seeds was determined by counting the number of filled husks that remained after the separation step. The total seed yield was measured by weighing all filled husks harvested from a plant. Total seed number per plant was measured by counting the number of husks harvested from a plant. Thousand Kernel Weight (TKW) is extrapolated from the number of filled seeds counted and their total weight. The Harvest Index (HI) in the present invention is defined as the ratio between the total seed yield and the above ground area (mm²), multiplied by a factor 10⁶. The total number of flowers per panicle as defined in the present invention is the ratio between the total number of seeds and the number of mature primary panicles. The seed fill rate as defined in the present invention is the proportion (expressed as a %) of the number of filled seeds over the total number of seeds (or florets).

### Example 11

### Phenotypic Evaluation Procedure

### 11.1 CLC-Like Polypeptides

[0646] Transgenic rice plants expressing the CLC-like gene under the control of the GOS2 promoter had increased seed yield, in particular increased fillrate (proportion in % of the number of filled seeds over the number of florets), total weight of seeds (totalwgseeds, indication of the seed yield per plant in g), harvest index, number of filled seeds (nrfilledseed) and Thousand Kernel Weight (TKW, seed weight of 1000 seeds).

[0647] Furthermore, the plants were also taller (increased GravityYMax, which is the height of the gravity center of the leafy biomass and HeightMax, the height of the highest tip of the plant) and two of the tested lines had increased root biomass (increased RootMax (indication of total root biomass) and RootShlnd (the ratio between root mass and shoot mass in the period of active growth of root and shoot)) compared to the controls.

TABLE E1
Data summary for transgenic rice plants; for each parameter,
the overall percent increase is shown for the T1 generation,
for each parameter the p-value is <0.05.

| Parameter | Overall increase |
|---|---|
| totalwgseeds | 33.5 |
| nrfilledseed | 30.2 |
| fillrate | 42.9 |
| harvestindex | 36.1 |
| TKW | 3.5 |

### 11.2 OsBURP-Like Polypeptides

[0648] Transgenic rice plants expressing the OsBURP-like gene under the control of the GOS2 promoter had increased seed yield, in particular increased fillrate (proportion in % of the number of filled seeds over the number of florets), totalwgseeds (indication of the seed yield per plant in g) and Thousand Kernel Weight (TKW, seed weight of 1000 seeds).

[0649] Furthermore, an increase was observed for number of filled seeds, harvest index and number of flowers per panicle; the plants were also taller (increased GravityYMax, which is the height of the gravity center of the leafy biomass) compared to the controls (Table E2).

TABLE E2
Data summary for transgenic rice plants; for each
parameter, the overall percent increase is shown
and for each parameter the p-value is <0.05.

| Parameter | Overall increase or decrease |
|---|---|
| Totalwgseeds | 14.9 |
| Fillrate | 16.9 |
| Harvestindex | 15.1 |
| Flowerperpan | 6.9 |
| GravityYMax | 8.2 |
| Nrfilledseed | 11 |
| TKW | 4 |

[0650] In addition, some lines showed increased early vigour or had more root biomass.

### 11.3 AP2/ERF-Like Polypeptides

[0651] The results of the evaluation of transgenic rice plants expressing an AP2/ERF nucleic acid encoding the AP2/ERF polypeptide of SEQ ID NO: 160 under drought-stress conditions are presented hereunder in Table E3. An increase of more than 5% was observed for total seed weight (totalwgseeds), number of filled seeds (nrfilledseed), fill rate (fillrate) and harvest index (harvestindex).

[0652] In addition, plants expressing an AP2/ERF nucleic acid showed to have increased biomass, such as maximum height, early vigour and total root biomass (results not shown).

TABLE E3
Data summary for transgenic rice plants expressing an
AP2/ERF nucleic acid encoding the AP2/ERF polypeptide
of SEQ ID NO: 160 under drought-stress conditions.

| Parameter | Overall |
|---|---|
| totalwgseeds | 33.2 |
| fillrate | 55.2 |
| harvestindex | 50.1 |
| nrfilledseed | 38.5 |

For each parameter the overall percent increase is shown (p-value <0.05).

### 11.4 TPS, TPP and TPS-TPP Polypeptide

[0653] Performance of rice plants transformed with the vectors pGOS2:: A.thaliana_DNTPS1-TPPB, pGOS2::S.cerevisiae_TPS1/TPS2_fusion and pS.cerevisiae_TPS1/TPS2_fusion under the nitrogen deficiency screen was evaluated according to procedures described in the examples herein. The results are presented in Table E4.

| Promoter | GOS2 | GOS2 | GOS2 |
|---|---|---|---|
| Gene | A.thaliana_DNTPS1- | (TPS1/TPS2 | (Chl-Rbc- |
| | TPPB | Fussion S.c.) | ScTPS1/ |
| | | | ScTPS2) |
| Sub-cellular | No | No | chloroplastic |
| targeting | | | |
| Yield related | % increase in | % increase in | % increase in |
| trait | transgenic plant | transgenic plant | transgenic plant |
| | compared to | compared to | compared to |
| | control plant | control plant | control plant |
| | (Overall %) | (Overall %) | (Overall %) |
| AreaMax | 18.5 | 19.4 | 8.4 |
| EmerVigor | 14.1 | 6.3 | ND |
| Timetoflower | ND | ND | 3.16 |
| RootMax | 12.9 | 4.8 | ND |
| totalwgseeds | 37.2 | ND | 15.9 |
| nrtotalseed | 40.2 | 27.2 | 22.4 |
| nrfilledseed | 45.6 | ND | 20.5 |
| firstpan | ND | ND | 20.4 |
| flowerperpan | ND | 16.0 | ND |

[0654] Areamax: above ground biomass of a plant which is indicative of the leaf biomass. It is measured as the maximum of area (in mm² from the digital pictures) covered by leafy biomass in the life span of a plant, based on the asymptote of the curve fitting or, if the fit is not satisfactory, based on the absolute maximum.

[0655] EmerVigor: indication of the seedling vigour. The area (in mm² from the digital pictures) covered by leafy biomass at 2-3 weeks post germination.

[0656] Firstpan: the number of panicles in the first floral flush.

[0657] Flowerperpan: a calculated parameter estimating the average number of florets per panicle on a plant (nrtotalseeds/firstpan).

[0658] Nrfilledseed: number of filled seeds of a plant.

[0659] Nrtotalseed: number of florets of a plant (empty seeds+filled seeds).

[0660] RootMax: indication of the total root biomass. Maximum biomass of roots observed during the lifespan of a plant (obtained from the digital images).

[0661] TimetoFlower: The time (in days) between sowing and the emergence of the first panicle.

[0662] Totalwgseeds: Indication of the yield per plant (in g).

The application's sequence listing, which the Patent Office published only in electronic form, follows.

SEQUENCE LISTING (503 sequences)

SEQ ID NO: 1 - DNA, 2352 bp, Oryza sativa
atggaggaggagcagagcccgaggctcgccgccggcgagccggagcgcaagctcgaggacggagtcaccgacgccgaggaccccgggtgcacgggcaatgcggccatgagctcgctggagcagccgcttctgaagcggagcaacacgctaacggccagccacctcgccatggttggcgccaaggtctcccacatcgagagcctcgactacgaaattatcgagaatgatctgttcaagcacgactggaggaggcgatcgaacgtggaggtgctgcagtacatcttcctcaagtgggccatggcgttcctcgtcggcctcctcaccggcgtcatcgcgtcgctcatcaacctcgccatcgagaacatctccggcctcaagatgctccacatggtgcagctcgtccgcaagaaaagatactgggccggtttcttgtatttcgccggcgtcaacttcggcctgacgttcatcgccgccatgctctgcgtcgtcttcgccccgaccgccgccggccccggcatcccggagatcaaggcctacctcaacggcgtcgacacgcccaacatgttcggcgcgccgcagctcattgtcaagatcatcggtagcatctgcgcggtgtcgtcggggctggatctcgggaaggaagggccactggtgcacatcggcgcgtgcctggcgaacttgctgagccagggcggctccggccggcaccgcctccggttgcggtggctgcgctacttcgacaacgaccgcgaccggcgcgacctgatcacctgcggcgcgtcatcgggcgtgtgcgcggcgttccgggcgcccgtcggcggcgtgctgttcgcgctggaggaggtggcgacgtggtggcggagcgcgctgctgtggcgcaccttcttcagcacggccaccgtcgtcgtcgtcctccgcgggttcatcgaggtgtgcaggaacgggcggtgcggtctgttcggcgagggcgggctcatcctgttcgacgtcggcgacgtcgccgtccggtaccacgccggcgacctcctcccggtgaccatcgtcggcgtgcttggcggcgtcctcggcgcgctgtacaaccacgtcctccacaaggtgctccgcgtgtacaacctcatcaacgagaagggccgcgccgcgaagctcgccctggcgctcgccgtgtgcgcgctcacgtcggcgctgctgtacgtgacgccgttcgccgtgccgtgcacgccgtgcgacccggcgttcggcggcgcgtgcccgacgctggggaagagcggcaacttcaagcggttcaactgccccgagggccactacaacgacctcgccaccctcctccacgccaccaacgtcgacgcgacgcggaacatcttctccacgggcaccgccggcgagttcaggctcgactcgctgctcatcttcttcgccgtctactgcgtcctgggcctcttcaccttcggcatcgccgtcccctcggggctcttcctccccatcatcctcatgggctccgcctacggccgcgtcacggcgctcgtgctgtcgcggttcgcccgcatcgaccacggcctatacgccgtgctcggcgcggcggcgctcatgtcggggtccatgcggatgaccgtgtcgctcgtcgtcatcttcctcgagctcaccaacaacctcctcctcctcccaatcaccatgttcgtcctcctcatcgccaagaccgtcggcgacgcgttcaaccccagcatctacgagatcatcctcgacctcaagggcctcccgttcctggaggcgaagccggagccgtggatgaaggacctcaccgtcggcgagctcgccgccgccaagccccgcgccgtggcgctccaggtggtggagcgcgtgtccacggtggtggaggcgctccgggcgacgcggcacaacgggttcccggtgctggaccggccgcggcccggggtatcggagctgcacgggctggtgctccggtcgcacctcgtcgccgcgctgaggaagcggtggttcctgccggagaggaggaggacggaggagtgggaggcccgcgagatgttcagctcggcggagctcgcggacaagtgcggcggcgtggacgagctggagatctcgccggaggagatggggatgtacgtggacctccacccgctgacgaacacgacgccgtacaccgtggtggagaccatgtcggtggcgaaggccgtcgtgctgttccgctccgtcgcgctccgccacatgctcatcatgcccaagttccaaggacccgagatatctccaattgtggggatcttgacaaggcaggacctgatagcacacaacatcctcggtgcatttccacaccttgcaagcaagaggaaaacacattga

SEQ ID NO: 2 - protein, 783 aa, Oryza sativa
MEEEQSPRLAAGEPERKLEDGVTDAEDPGCTGNAAMSSLEQPLLKRSNTLTASHLAMVGAKVSHIESLDYEIIENDLFKHDWRRRSNVEVLQYIFLKWAMAFLVGLLTGVIASLINLAIENISGLKMLHMVQLVRKKRYWAGFLYFAGVNFGLTFIAAMLCVVFAPTAAGPGIPEIKAYLNGVDTPNMFGAPQLIVKIIGSICAVSSGLDLGKEGPLVHIGACLANLLSQGGSGRHRLRLRWLRYFDNDRDRRDLITCGASSGVCAAFRAPVGGVLFALEEVATWWRSALLWRTFFSTATVVVVLRGFIEVCRNGRCGLFGEGGLILFDVGDVAVRYHAGDLLPVTIVGVLGGVLGALYNHVLHKVLRVYNLINEKGRAAKLALALAVCALTSALLYVTPFAVPCTPCDPAFGGACPTLGKSGNFKRFNCPEGHYNDLATLLHATNVDATRNIFSTGTAGEFRLDSLLIFFAVYCVLGLFTFGIAVPSGLFLPIILMGSAYGRVTALVLSRFARIDHGLYAVLGAAALMSGSMRMTVSLVVIFLELTNNLLLLPITMFVLLIAKTVGDAFNPSIYEIILDLKGLPFLEAKPEPWMKDLTVGELAAAKPRAVALQVVERVSTVVEALRATRHNGFPVLDRPRPGVSELHGLVLRSHLVAALRKRWFLPERRRTEEWEAREMFSSAELADKCGGVDELEISPEEMGMYVDLHPLTNTTPYTVVETMSVAKAVVLFRSVALRHMLIMPKFQGPEISPIVGILTRQDLIAHNILGAFPHLASKRKTH

SEQ ID NO: 3 - DNA, 2343 bp, Arabidopsis thaliana
atggtggaagaagatttaaaccagattggtggtaatagtaattacaatggagaaggaggcgacccagagagcaacacacttaaccaacctctagttaaggctaatcgaacactttcttcaactccacttgctttggttggtgccaaagtttcccatatcgaaagcttggactatgaaataaacgagaacgatctgtttaagcatgattggagaaaaagatcaaaggcacaagtacttcaatacgtgttcttgaaatggacgttagcttgtcttgttggtcttttcactggtttaatcgctactctcatcaacttagctgttgaaaacatcgccggctataagcttttagccgttggtcacttcctcactcaagaaagatatgttacaggtctgatggtgcttgttggggcgaatttgggactgacgttggtggcgtctgtgctttgtgtgtgctttgctcctacggcggctggacctggaatccctgagatcaaagcttatcttaatggtgtagatactcccaacatgtttggtgctactactatgatcgttaagattgttggaagcattggagcggttgcagctggacttgatctaggtaaagagggtcctctagttcacattggaagctgcatagcttctttgcttggacaaggtggaacagacaaccaccgtatcaagtggcggtggcttcgttacttcaacaacgatagagaccgcagggatctgattacatgtggctcagctgcaggagtgtgtgcagccttcaggtcacctgttggaggtgtacttttcgccctcgaggaagttgctacttggtggagaagtgccttattgtggcggactttcttcagcacagcggttgttgtggttgttctaagagagttcatagagatctgcaattcagggaagtgtgggttgtttggaaaaggagggctaatcatgtttgatgtgagtcatgtaacttatacttaccatgtaactgatataatccctgtcatgttgattggtgtaatcggtggaattcttgggagcctgtacaatcatcttctgcataaagttctcaggctttacaatctcatcaatgagaagggtaagatccataaggtgcttctcagtcttacagtatcactctttacatctgtttgcctttatggccttcctttcttagcgaaatgcaagccttgtgacccctcgatagatgagatatgcccgacgaatggaagatcgggtaacttcaaacagttccattgccctaaaggttactacaatgatctagctactctgcttctcaccaccaacgatgatgctgtcagaaaccttttctcttccaacactcccaatgagtttggtatgggttccctttggatattctttgtgctatactgcatcttggggcttttcacatttggtattgcaacaccgtctggtctcttcctccccatcatcctcatgggtgctgcatatggccgaatgcttggcgctgcaatgggatcatacacaagtattgaccaagggctttatgctgtccttggtgcagctgcactcatggctggatcgatgagaatgactgtgtcactctgtgttatattccttgaactcaccaacaaccttcttttgcttcctataacgatgatcgtgcttctgatagccaaaactgtgggagacagctttaacccgagtatatatgacatcatcttgcatctaaagggcttacctttcttagaagcaaatccagagccgtggatgaggaacctcaccgttggtgagcttggtgatgctaagcccccggttgtaaccctgcaaggtgttgaaaaggtttcaaatatagttgatgtgctaaagaacacgacgcataatgcattccctgttttagatgaagcagaagtacctcaagtgggtctagcaactggggctacagaactccacgggttgatcttgagagcgcacctcgttaaagttctgaaaaagagatggttcttgacagagaaaagaagaacagaggagtgggaggtcagagaaaagtttccatgggatgaattggctgaaagagaagacaactttgacgacgtggccatcacaagcgctgaaatggaaatgtatgtcgatcttcatcctctcaccaacacaacaccttacacagtcatggagaacatgtcagtggccaaggctttagtacttttccggcaagtgggactccggcatttgcttattgttcccaagattcaagcctcaggaatgtgtcctgtggtagggatcttaaccagacaggacctaagggcatacaacattctacaagcctttcctctcttggaaaaatccaaaggtggaaagacacattga

SEQ ID NO: 4 - protein, 780 aa, Arabidopsis thaliana
MVEEDLNQIGGNSNYNGEGGDPESNTLNQPLVKANRTLSSTPLALVGAKVSHIESLDYEINENDLFKHDWRKRSKAQVLQYVFLKWTLACLVGLFTGLIATLINLAVENIAGYKLLAVGHFLTQERYVTGLMVLVGANLGLTLVASVLCVCFAPTAAGPGIPEIKAYLNGVDTPNMFGATTMIVKIVGSIGAVAAGLDLGKEGPLVHIGSCIASLLGQGGTDNHRIKWRWLRYFNNDRDRRDLITCGSAAGVCAAFRSPVGGVLFALEEVATWWRSALLWRTFFSTAVVVVVLREFIEICNSGKCGLFGKGGLIMFDVSHVTYTYHVTDIIPVMLIGVIGGILGSLYNHLLHKVLRLYNLINEKGKIHKVLLSLTVSLFTSVCLYGLPFLAKCKPCDPSIDEICPTNGRSGNFKQFHCPKGYYNDLATLLLTTNDDAVRNLFSSNTPNEFGMGSLWIFFVLYCILGLFTFGIATPSGLFLPIILMGAAYGRMLGAAMGSYTSIDQGLYAVLGAAALMAGSMRMTVSLCVIFLELTNNLLLLPITMIVLLIAKTVGDSFNPSIYDIILHLKGLPFLEANPEPWMRNLTVGELGDAKPPVVTLQGVEKVSNIVDVLKNTTHNAFPVLDEAEVPQVGLATGATELHGLILRAHLVKVLKKRWFLTEKRRTEEWEVREKFPWDELAEREDNFDDVAITSAEMEMYVDLHPLTNTTPYTVMENMSVAKALVLFRQVGLRHLLIVPKIQASGMCPVVGILTRQDLRAYNILQAFPLLEKSKGGKTH

SEQ ID NO: 5 - DNA, 2379 bp, Arabidopsis thaliana
atgttatcgaatcatctccagaacgggatcgaatccgataacctactctggtctcgtgtccctgaatccgatgatacttccaccgacgatattactctactcaactctcaccgtgacggtgacggaggtgtcaatagtctcgattacgaagtcatcgagaattacgcttatagagaagaacaagctcatcgaggaaagctttatgttggttactacgttgctgtcaaatggttcttctctttactcatcgggatcggaactggattagctgctgtgttcatcaatctctctgttgagaatttcgctggatggaaatttgctcttacttttgctattattcagaagtcgtattttgctgggtttattgtttatcttctcatcaatttagtcttagtgttttcttctgcgtatattattactcaatttgctcctgctgctgctggttctggcattcctgagattaagggttatctcaatggaattgatattcccggcaccttgctctttagaactctcattggaaagatatttggaagcattggttctgttgggggtggcttagccttggggaaagaaggtcctcttgtgcatacaggtgcctgcattgcatcgttgcttggtcagggtggatctacgaaatatcatttgaattctagatggccgcaactttttaagagtgatagagatcggcgtgatcttgtcacttgtggatgtgcagctggagttgctgctgcctttagagccccagttggtggagtgttatttgcattagaggaggtcacatcatggtggagaagtcaacttatgtggcgtgtctttttcacttccgctattgtggctgttgttgtgcgtactgccatgggatggtgcaagagtggaatatgtggacattttggtggaggtggtttcattatatgggatgtatcagatggtcaagatgactactacttcaaagagctactgccaatggctgtaataggagttatcggagggctacttggggcattatttaaccaacttacactctatatgacatcttggcgtcggaactctttgcacaagaaaggaaatcgagtgaagataattgaagcatgcatcatctcttgtataacttcagctatctcatttgggctgccactcctaagaaaatgcagtccatgccctgaatcagttcctgactctggtattgagtgtccacgacctccaggaatgtatggaaattatgtaaatttcttctgcaagacggataacgaatacaatgatctcgctacaattttcttcaatactcaggatgatgctataaggaatttgttcagcgcaaaaacaatgcgagagttcagtgctcagagtctactaacttttctggctatgttttacacattagctgtagtgacctttggcactgctgttcccgccggccagtttgttcctggaataatgataggatcaacttatgggcgccttgtaggcatgtttgtggtcaggttttataagaagctcaacattgaggagggaacttatgctttgctgggagctgcttcatttctcggaggctcgatgcggatgactgtatctttatgtgttatcatggttgaaatcacaaataacctgaaacttctgcctcttataatgttggtacttctcatctcaaaggccgtcggtgatgctttcaatgagggattatatgaagtacaagcacgcctgaagggcattccgttacttgaatcgagacctaagtatcacatgcgtcaaatgatagcaaaggaagcgtgtcaaagtcagaaggtaatctctttacctcgagttatcagggtcgcagatgttgcttcaattttgggcagcaataaacataatggatttcctgtaatcgaccacacgagaagtggtgaaacacttgtcatagggttagtccttcggagtcacttgcttgttctccttcaatcaaaagtcgatttccaacatagtcctttgccttgtgatccaagtgccaggaatatcaggcacagttttagcgagtttgctaaacctgtttcatcgaaagggttatgcatagaagatatacatttaacttcagatgatttagagatgtacatagatcttgctccatttttgaatccgtctccatacgttgttcccgaagacatgtccttgacaaaggtatacaatcttttccggcaacttgggttgcgacatctattcgttgttccccgtccttcccgtgtgataggcttgatcaccagaaaggatttactgattgaggaaaatggggaatcatcagcagtggaactccaacagtcaactagtgtaagaggtcggtacagtgagacagcaacgcggatggacgctgcacgaccgcttctagacgatcttttaggttaa

SEQ ID NO: 6 - protein, 792 aa, Arabidopsis thaliana
MLSNHLQNGIESDNLLWSRVPESDDTSTDDITLLNSHRDGDGGVNSLDYEVIENYAYREEQAHRGKLYVGYYVAVKWFFSLLIGIGTGLAAVFINLSVENFAGWKFALTFAIIQKSYFAGFIVYLLINLVLVFSSAYIITQFAPAAAGSGIPEIKGYLNGIDIPGTLLFRTLIGKIFGSIGSVGGGLALGKEGPLVHTGACIASLLGQGGSTKYHLNSRWPQLFKSDRDRRDLVTCGCAAGVAAAFRAPVGGVLFALEEVTSWWRSQLMWRVFFTSAIVAVVVRTAMGWCKSGICGHFGGGGFIIWDVSDGQDDYYFKELLPMAVIGVIGGLLGALFNQLTLYMTSWRRNSLHKKGNRVKIIEACIISCITSAISFGLPLLRKCSPCPESVPDSGIECPRPPGMYGNYVNFFCKTDNEYNDLATIFFNTQDDAIRNLFSAKTMREFSAQSLLTFLAMFYTLAVVTFGTAVPAGQFVPGIMIGSTYGRLVGMFVVRFYKKLNIEEGTYALLGAASFLGGSMRMTVSLCVIMVEITNNLKLLPLIMLVLLISKAVGDAFNEGLYEVQARLKGIPLLESRPKYHMRQMIAKEACQSQKVISLPRVIRVADVASILGSNKHNGFPVIDHTRSGETLVIGLVLRSHLLVLLQSKVDFQHSPLPCDPSARNIRHSFSEFAKPVSSKGLCIEDIHLTSDDLEMYIDLAPFLNPSPYVVPEDMSLTKVYNLFRQLGLRHLFVVPRPSRVIGLITRKDLLIEENGESSAVELQQSTSVRGRYSETATRMDAARPLLDDLLG

SEQ ID NO: 7 - DNA, 2292 bp, Arabidopsis thaliana
atgccaaactcaacgacggaggactccgtcgccgttccactactcccctccctccgccgcgctactaactctacttctcaagtagcaatcgtcggtgccaacgtctgtccaatagaaagtctcgattacgaaatcgcggagaatgatttcttcaagcaggattggagaggtcgtagtaaggtagagattttccaatacgtgtttatgaagtggctgctttgtttttgtatcggcattattgttagtctcatcggattcgctaataacctcgccgttgagaatctcgccggtgttaagtttgttgttacttctaacatgatgatagccggaaggtttgctatgggttttgttgttttctctgttacaaatttgattcttactctctttgcgtcggtgattaccgcttttgttgctcctgctgcggcaggttccggtataccggaagttaaggcttatttgaatggtgttgatgctccagagatattctcacttcgcactttgatcattaagatcattgggaacatatctgcagtatcagcgtctcttctcattggaaaggcagggcctatggtgcatactggtgcttgtgttgcatctatacttggtcagggtggctccaaaagatatagattgacctggagatggctcagatttttcaaaaatgatagagacagaagagatcttgtaacttgtggggcagctgctggtatcgctgcttcgtttcgtgctccggttggtggtgtcctgtttgcgcttgaggaaatgtcatcttggagtgcacttttatggagaatcttcttttcgacagctgttgtggcaatagttctcagagctctaatcgatgtgtgtttaagtggaaagtgtgggttatttggtaaaggaggcttaataatgtttgatgtctactcagaaaatgcgtcatatcatttaggggatgtacttcctgttcttcttcttggggttgttggtggtattttaggaagcttatacaacttcttactggataaggttctgcgagcttacaactacatatatgagaaaggggttacttggaaaatcctcctcgcttgtgcgatatcgattttcacgtcctgccttcttttcggattaccatttcttgcatcatgccaaccttgtcctgtcgatgccttagaggagtgccctacaattggacggtctggaaactttaagaaataccaatgccctcctggtcactacaatgatctagctagccttattttcaacacaaatgatgatgccatcaaaaaccttttcagcaaaaacactgacttcgagtttcattatttttcggttctcgtattttttgtcacctgcttcttcctcagtatctttagctatggcattgttgctccagcagggctctttgtgccagttattgtaacaggagcatcgtatggacggtttgtagggatgctgcttggttcaaactcaaatcttaatcatggtctgtttgctgtgctcggtgctgcatcctttcttggcggaacaatgaggatgacagtttccacttgtgttattctccttgagctgaccaacaatctgctgctactacctatgatgatggtggtccttctgatttcaaaaacagttgctgatggtttcaatgctaacatctacaacctcatcatgaagttaaaaggatttccctacctctacagccatgcagagccttacatgaggcagcttctagttggtgatgtagtcaccggcccacttcaagtcttcaatggcattgagaaagtcgagactattgtacacgttctcaaaacgaccaatcacaatggcttccccgtggttgatgggccaccactagctgcagctcctgttctacacggtctaatcctccgggctcatattctgactctgttaaagaaacgagtattcatgcctagtccagtagcttgtgactccaataccctttcccaattcaaggcagaggagtttgctaagaagggttctgggaggagtgataagatagaagatgtggaattaagcgaggaagaattgaatatgtatttggatttgcacccattctctaatgcctctccgtacactgttgtggagacaatgtcacttgcaaaggcccttattctcttccgtgaggttggcataaggcacttactggttataccaaaaacctccaatagacctccagtggtaggtatattgacacggcatgacttcatgccggaacatatactaggcctgcatccctccgtttctcggagcaagtggaaaaggcttcggattcggctgcctttcttctcatga

SEQ ID NO: 8 - protein, 763 aa, Arabidopsis thaliana
MPNSTTEDSVAVPLLPSLRRATNSTSQVAIVGANVCPIESLDYEIAENDFFKQDWRGRSKVEIFQYVFMKWLLCFCIGIIVSLIGFANNLAVENLAGVKFVVTSNMMIAGRFAMGFVVFSVTNLILTLFASVITAFVAPAAAGSGIPEVKAYLNGVDAPEIFSLRTLIIKIIGNISAVSASLLIGKAGPMVHTGACVASILGQGGSKRYRLTWRWLRFFKNDRDRRDLVTCGAAAGIAASFRAPVGGVLFALEEMSSWSALLWRIFFSTAVVAIVLRALIDVCLSGKCGLFGKGGLIMFDVYSENASYHLGDVLPVLLLGVVGGILGSLYNFLLDKVLRAYNYIYEKGVTWKILLACAISIFTSCLLFGLPFLASCQPCPVDALEECPTIGRSGNFKKYQCPPGHYNDLASLIFNTNDDAIKNLFSKNTDFEFHYFSVLVFFVTCFFLSIFSYGIVAPAGLFVPVIVTGASYGRFVGMLLGSNSNLNHGLFAVLGAASFLGGTMRMTVSTCVILLELTNNLLLLPMMMVVLLISKTVADGFNANIYNLIMKLKGFPYLYSHAEPYMRQLLVGDVVTGPLQVFNGIEKVETIVHVLKTTNHNGFPVVDGPPLAAAPVLHGLILRAHILTLLKKRVFMPSPVACDSNTLSQFKAEEFAKKGSGRSDKIEDVELSEEELNMYLDLHPFSNASPYTVVETMSLAKALILFREVGIRHLLVIPKTSNRPPVVGILTRHDFMPEHILGLHPSVSRSKWKRLRIRLPFFS

SEQ ID NO: 9 - DNA, 2328 bp, Arabidopsis thaliana
atggatgaagatggaaacttgcagattagtaatagtaattacaatggagaagaagaaggagaagatccagagaacaacactttgaatcaaccactgcttaagagacatagaactctttcttcaactcctcttgctttggtcggtgccaaggtttcacacatcgagagtttagattatgaaataaacgagaatgatctgttcaagcatgactggagaagcagatcaaaagcacaagtgtttcaatacatattcttaaaatggacattagcttgtcttgttggtctcttcactggtcttatcgctactctcatcaaccttgctgtcgaaaacatcgccggttacaaacttctcgccgtcggctactacattgctcaagataggttttggacaggtctgatggtctttacgggggcgaatttgggtctgactttggtggcgacagtacttgttgtttactttgctcctacggcggctggtccggggatccctgagattaaagcttaccttaatggcattgacactcccaatatgtttggttttaccaccatgatggttaagattgttggaagtattggagcggttgcagctggacttgatcttggtaaagaagggccattggttcatattggaagttgcatagcttctttgcttggtcaaggtggtccagataatcacagaatcaaatggagatggcttcgttacttcaacaacgatagagatcgaagagatcttattacatgtggatctgcctctggagtatgtgctgctttcaggtcaccagtaggaggagtacttttcgctcttgaggaagtcgctacgtggtggagaagcgctctcttgtggagaacattcttcagtacagccgttgtggtggttgtattaagagcgttcattgagatttgtaactccgggaaatgcggacttttcggctcaggaggactcattatgttcgatgtgagtcatgtagaggttaggtaccacgcagcagatataatcccagtcacattgattggagtctttggtggcattcttggaagcttgtacaatcatcttctgcataaagttctccggctttacaatctcatcaaccagaagggaaagattcataaggtgcttctaagtcttggggtatctctattcacatcagtttgcttgttcggtcttcctttcttagcggaatgcaagccttgtgatccttctatagacgagatatgtccaacaaacggaagatcaggaaatttcaagcaattcaactgtccaaatggttattacaacgatctatccactctgcttctcacaaccaatgatgatgcagtcagaaacattttctcttcaaacactcctaatgagtttggcatggtttctctctggatattctttggcctctactgcattttgggtcttataacattcggtatagcgacaccgtcgggtctcttcctaccgattatcctcatgggttctgcatacggtaggatgctaggcacagcaatggggtcttacacaaacatagatcaagggctttacgcggttcttggtgcagcttcactcatggctggttcaatgagaatgactgtttcactctgtgttatatttctggaactcaccaacaaccttcttttgttgcccattacaatgtttgtgcttctgatagctaaaacagtaggtgacagcttcaatctaagtatctacgagatcattctccatcttaagggcttacctttcttggaagcaaatccagagccgtggatgaggaatctcactgtaggtgagcttaacgacgctaagcctccggttgtaacacttaacggagtagaaaaagtggcaaatatagtcgatgtactaaggaacacaacgcataacgcattcccagtcttggatggagcagatcaaaacactggcacagagctccatggtctgatcctaagagctcaccttgtgaaagttctgaaaaagagatggttcttgaatgagaaaaggagaacagaagagtgggaagttagggaaaagttcacaccggttgaattagctgagagagaagataacttcgatgatgttgcaatcacaagctcagagatgcaattgtatgttgatcttcatcctttgaccaacactacaccttacacagtggtgcaaagtatgtcagtggctaaagctttggttctgttccggtcagtgggtctcagacatttactggtggttcccaagattcaagcttcagggatgtcacctgtgatagggatcttaacaaggcaagatctcagggcttataacattctacaagcatttcctcacttggataaacacaaaagtggaaaagctagatga

SEQ ID NO: 10 - protein, 775 aa, Arabidopsis thaliana
MDEDGNLQISNSNYNGEEEGEDPENNTLNQPLLKRHRTLSSTPLALVGAKVSHIESLDYEINENDLFKHDWRSRSKAQVFQYIFLKWTLACLVGLFTGLIATLINLAVENIAGYKLLAVGYYIAQDRFWTGLMVFTGANLGLTLVATVLVVYFAPTAAGPGIPEIKAYLNGIDTPNMFGFTTMMVKIVGSIGAVAAGLDLGKEGPLVHIGSCIASLLGQGGPDNHRIKWRWLRYFNNDRDRRDLITCGSASGVCAAFRSPVGGVLFALEEVATWWRSALLWRTFFSTAVVVVVLRAFIEICNSGKCGLFGSGGLIMFDVSHVEVRYHAADIIPVTLIGVFGGILGSLYNHLLHKVLRLYNLINQKGKIHKVLLSLGVSLFTSVCLFGLPFLAECKPCDPSIDEICPTNGRSGNFKQFNCPNGYYNDLSTLLLTTNDDAVRNIFSSNTPNEFGMVSLWIFFGLYCILGLITFGIATPSGLFLPIILMGSAYGRMLGTAMGSYTNIDQGLYAVLGAASLMAGSMRMTVSLCVIFLELTNNLLLLPITMFVLLIAKTVGDSFNLSIYEIILHLKGLPFLEANPEPWMRNLTVGELNDAKPPVVTLNGVEKVANIVDVLRNTTHNAFPVLDGADQNTGTELHGLILRAHLVKVLKKRWFLNEKRRTEEWEVREKFTPVELAEREDNFDDVAITSSEMQLYVDLHPLTNTTPYTVVQSMSVAKALVLFRSVGLRHLLVVPKIQASGMSPVIGILTRQDLRAYNILQAFPHLDKHKSGKAR

SEQ ID NO: 11 - DNA, 2340 bp, Arabidopsis thaliana
atggatgatcggcacgaaggagaccatcatgatatagaggttgaaggaggagctttacatggtttcgagaggaagatatctgggattctagacgatggatctgtcggatttcgacagcctcttctcgctaggaatcgaaagaacacaacttctcagatcgctattgtcggagctaatacttgtcccatcgaaagccttgattacgagatcttcgaaaatgattttttcaagcaagactggaggtctaggaagaagattgagatacttcagtatacgtttctcaaatgggcgcttgcttttcttattggtttagctactggacttgttggctttttgaataaccttggtgttgagaatatagctggatttaaactcttgctcatcggtaatctcatgctcaaggaaaaatatttccaggcattttttgcatttgctggttgtaacttaattttggcaactgctgctgcttcactctgtgcttttattgctcctgcggcggcaggatctggcatacctgaggttaaagcatatctcaatggtatagatgcttattcaatattagctccaagcaccctctttgttaagatctttggctctatatttggagttgctgccggatttgtagttggaaaagaagggcctatggttcatactggtgcttgcattgctaatttacttggacaaggtggttccaaaaagtaccggttgacttggaagtggctcagattcttcaaaaacgatagagacagaagagacctgatcacttgcggggctgctgctggtgtagcagctgccttccgtgctccagttggaggagtgcttttcgcccttgaagaagctgcttcatggtggaggaatgcccttctctggaggacattcttcactaccgcagttgtagcagtggtcttacgaagtttgattgagttctgtcgctctgggagatgtggactgtttgggaaaggaggtctcatcatgtttgatgtaaactcgggaccagtgctatatagcactccagatttgctagcaatagtattccttggagttattggtggtgtgcttggaagcctttacaactaccttgtggacaaagtcctccgcacatatagcattataaacgagaaaggtccgagatttaaaattatgcttgtaatggcagtttccattttgagctcgtgttgcgcatttggtctcccatggctttcacagtgtactccatgtcctattggcatagaggagggaaagtgccctagtgtaggtcgatccagcatctataagagtttccagtgtcctccaaaccattacaatgacctttcctccctacttctcaacaccaatgatgatgcaatccgtaatcttttcacatccagatctgaaaatgaattccatatctctacccttgccatcttctttgtcgcagtgtactgccttggcatcataacatacggcatagccataccctctgggcttttcattcctgtcattcttgctggagcctcttatggacgactagtgggtagactgctgggtccagtatctcagcttgatgtaggtctgttttctctgctcggagctgcttccttccttggaggcacaatgagaatgacggtctctctatgtgttatactgctcgaacttacaaataatctcctaatgctgccactggtgatgcttgtactccttatatcaaaaacggttgcagattgtttcaacaggggggtctatgaccagattgtaacaatgaaaggactgccttacatggaagaccatgcagagccgtacatgcgcaatttggttgcaaaggacgtagtttctggagctttgatatccttttcgagagttgaaaaggttggggtaatatggcaggctttaaaaatgacaagacataatggtttccctgtaattgatgagccacctttcacagaagcttctgagctatgtgggattgccttgagatctcatctccttgtgcttctccaagggaagaaattctcgaagcagagaacaacttttggttcacaaattctgagaagttgcaaagcccgtgactttggtaaagcagggttaggtaaggggctcaagattgaagatttggatctaagtgaggaggagatggagatgtatgttgatctccatcccatcactaacacatctccttacactgtgcttgagactctgtctctagctaaggcggctattcttttccggcaacttggtcttcgccacttgtgtgtggtgcctaaaacaccagggagaccgcctattgttggaatactgacaaggcatgatttcatgccggaacatgtcctgggactctaccctcacattgatcccctcaagtga

SEQ ID NO: 12 - protein, 779 aa, Arabidopsis thaliana
MDDRHEGDHHDIEVEGGALHGFERKISGILDDGSVGFRQPLLARNRKNTTSQIAIVGANTCPIESLDYEIFENDFFKQDWRSRKKIEILQYTFLKWALAFLIGLATGLVGFLNNLGVENIAGFKLLLIGNLMLKEKYFQAFFAFAGCNLILATAAASLCAFIAPAAAGSGIPEVKAYLNGIDAYSILAPSTLFVKIFGSIFGVAAGFVVGKEGPMVHTGACIANLLGQGGSKKYRLTWKWLRFFKNDRDRRDLITCGAAAGVAAAFRAPVGGVLFALEEAASWWRNALLWRTFFTTAVVAVVLRSLIEFCRSGRCGLFGKGGLIMFDVNSGPVLYSTPDLLAIVFLGVIGGVLGSLYNYLVDKVLRTYSIINEKGPRFKIMLVMAVSILSSCCAFGLPWLSQCTPCPIGIEEGKCPSVGRSSIYKSFQCPPNHYNDLSSLLLNTNDDAIRNLFTSRSENEFHISTLAIFFVAVYCLGIITYGIAIPSGLFIPVILAGASYGRLVGRLLGPVSQLDVGLFSLLGAASFLGGTMRMTVSLCVILLELTNNLLMLPLVMLVLLISKTVADCFNRGVYDQIVTMKGLPYMEDHAEPYMRNLVAKDVVSGALISFSRVEKVGVIWQALKMTRHNGFPVIDEPPFTEASELCGIALRSHLLVLLQGKKFSKQRTTFGSQILRSCKARDFGKAGLGKGLKIEDLDLSEEEMEMYVDLHPITNTSPYTVLETLSLAKAAILFRQLGLRHLCVVPKTPGRPPIVGILTRHDFMPEHVLGLYPHIDPLK

SEQ ID NO: 13 - DNA, 2406 bp, Glycine max
atgctgtccaatcatttccaaaacggcatcgaaacggcgaggctcgtttggtcgcggattcctaattcggaagaatcgcagctcctcgacgacgccgttggcatccttaagaagaacgacggaggcggtgtcgagagccttgactatgaagtcattgagaattttgcttatcgtgaggaacaggcgcagagggggaagctgtatgtgagctatttgctggtggtgaaatggttctttgccttgctcattggcatttgtacaggacttgctgctgttttcatcaatattgctgttgaaaattttgctggctggaagttctcagtgacatttaatataattcagaaatcatatattgctggatttgttgtatatgtcctgatcaacttggctttggtgttttcctctgtatatattatcacacaatttgcaccagcagctgctggatctggtattcctgaaatcaagggttacttaaatggagttgatattcatggcatccttcttttcagaactctaattggaaagatatttggaagcattggttcagtgggtggaggccttgctcttggtaaagaaggtcctcttgtccatactggtgcttgtattgcttctttgcttggacaaggtggatctactaagtatcatctaaattcgaggtggtttcaagtattcaaaagtgaccgggatcgtcgtgatcttgtaacctgtggatgtgcagctggagttgctgcagcatttagagctccagttggtggtgtattgtttgctttggaagaggttacatcttggtggaggagtcaactcatgtggcgtgtcttcttcacttcggctgttgtggctgttgtggtccgagctgcaatggggtggtgtaagagtggaaaatgtggacactttgggtccggtggattcataatttgggatatatcagatggtcaagaggattattcctttgcggagttatttccaatggctattattggggttattggaggcctactaggctctttattcaaccaacttacactttatattaccacttggcgtcgaaatcatcttcacaagaaagggaacagggtcaagattattgaagcatgccttgtatccattttaacatcagccatttcatttggcttgccacttctaagaaaatgtagtccttgccctgattctgatcctgcatctggtattgaatgtccaagacctcctggaatgtatgggaattatgtaaattttttttgtagcaaagacaaggaatacaatgatcttgcaactattttcttcaacacacaggatgatgccataaggaatttgttcagtgcaaaaacaataaatgaatacagttctcaaagtttattaacttttttggttatgttttatgcgttagctgtggtcacatttggtactgctgtgccagctggtcaatttgttcctggtataatgatagggtcaacatatgggcgtcttgttggcatgtttgttgtaaaatattacagaaagctcaacattgaagagggaacgtatgctttgctgggagctgcatcttttcttggaggctcaatgcggatgacagtatctctctgtgtcattatggttgaaatctcaaataacttaaaatttttacctcttattatgcttgttcttcttatatcgaaggctgttggtgatgcttttaacgaaggtatctatgaggagcaggctcaattgaggggcattccattactggaatcaagacctaaatatgagatgcggaatatgacagcaaaggaagcctgtggtagtggaagggtggtctctttccctcgtgttgttaaggtttcagacgtagtttccattctgcggagcaacaaacacaatggttttccagtgattgatcacacaagaagtggagaaccacttgttattggattagtgcttcgtagtcatttattggtaattctgcagtcaaaggttgatttccagcatagccctttaccctctgatcctagaggtgggggcagatcaattaggcatgattctggtgaatttgcaaagcctgtttctagtaaaggaatatgtattgatgatatacatttaagttcagatgacttagaaatgtacatcgatcttgctccgtttttgaatccctcaccatatattgtaccagaagatatgtctttgacaaaggtatacaatcttttccgtcaacttggtctacggcatttatttgttgttccccgcccatcacgtgtgcttggtttgataacaagaaaagatttgttgattgaggacaaggaaaatgtgaatacgttagagcttcagtcaactagtgtaagaattccgcatcagaataaaagattgatgacaagaaatatagatgtggagcaccctttgctaagcggactgcttcagaatcagatacctgactaa

SEQ ID NO: 14 - protein, 801 aa, Glycine max
MLSNHFQNGIETARLVWSRIPNSEESQLLDDAVGILKKNDGGGVESLDYEVIENFAYREEQAQRGKLYVSYLLVVKWFFALLIGICTGLAAVFINIAVENFAGWKFSVTFNIIQKSYIAGFVVYVLINLALVFSSVYIITQFAPAAAGSGIPEIKGYLNGVDIHGILLFRTLIGKIFGSIGSVGGGLALGKEGPLVHTGACIASLLGQGGSTKYHLNSRWFQVFKSDRDRRDLVTCGCAAGVAAAFRAPVGGVLFALEEVTSWWRSQLMWRVFFTSAVVAVVVRAAMGWCKSGKCGHFGSGGFIIWDISDGQEDYSFAELFPMAIIGVIGGLLGSLFNQLTLYITTWRRNHLHKKGNRVKIIEACLVSILTSAISFGLPLLRKCSPCPDSDPASGIECPRPPGMYGNYVNFFCSKDKEYNDLATIFFNTQDDAIRNLFSAKTINEYSSQSLLTFLVMFYALAVVTFGTAVPAGQFVPGIMIGSTYGRLVGMFVVKYYRKLNIEEGTYALLGAASFLGGSMRMTVSLCVIMVEISNNLKFLPLIMLVLLISKAVGDAFNEGIYEEQAQLRGIPLLESRPKYEMRNMTAKEACGSGRVVSFPRVVKVSDVVSILRSNKHNGFPVIDHTRSGEPLVIGLVLRSHLLVILQSKVDFQHSPLPSDPRGGGRSIRHDSGEFAKPVSSKGICIDDIHLSSDDLEMYIDLAPFLNPSPYIVPEDMSLTKVYNLFRQLGLRHLFVVPRPSRVLGLITRKDLLIEDKENVNTLELQSTSVRIPHQNKRLMTRNIDVEHPLLSGLLQNQIPD

SEQ ID NO: 15 - DNA, 2286 bp, Glycine max
atgggtgaggaatccagtttgcttaaagaaagcacatcaatcaatgacaccaatatggtggaagaggttgaagaaagggatccagaaagcaatccattgaatgagccacttctcaagaggaacaggactttgtcttccaatccacttgctcttgttggagcaaaagtttcctacatagaaagcttggactacgagatcaatgagaatgacctgttcaaacaagattggaggagcagatcaagaactcaagtgttgcaatacatattctggaaatggactctggcattccttgttggacttctcactggtgtcatagccactcttatcaatcttgctgttgagaacattgccgggtacaagtttcttgctgttgtcaactttatccaaaaagaaaggtacttgagaggtttcctatatttcacgggcattaatttccttttgacatttgttgcttctattctgtgtgtgtgttttgcacccacggcagctgggcctggaatacctgaaatcaaagcttatcttaatggtgttgatactcccaacatgtatggtgccaccacattgtttgttaagataattggaagcattggagctgtatctgcaggcctagatttaggaaaagaagggccattggccaaggaggccctgacaattacaggatcaagtggcgctggctacggtatttcaacaacgatcgtgaccgtcgcgatcttattacttgtggcacctgtgggaggagttctctttgctcttgaagaggtggcaacttggtggagaagtgctctcctctggagaacatttttcagcacagctgtggtggtggtagtgctaagggcctctattgaactttgccacaaaggcaagtgtggtctttttggtgaaggagggctcatcatgtatgatgtgagcgatgtcactgttaggtacaatgtgatggatatcatccctgttgttatcattggagtcctaggtggggtattgggaagcctttacaactatcttctccataaggtcctccgtgtctacaatctcatcaatcagaaaggaaaaatgtacaagctcctcctcagtctttcagttgcaatcttcacatcagcgtgccaatatggtctcccattcctagcaaaatgtaccccttgtgatccatccctctcagatgtgtgccccaccaacgggcgttctggaaacttcaaacaattcaactgcccaaaaggctactacaatgatcttgctactcttcttctgaccaccaatgatgatgctgttagaaacatattctcaaccaacacccctcttgaataccaaccctcctccatcataattttctttgcactgtattgcatactaggactaatcacctttgggattgctgtgccatcagggctcttcctccccatcattctcatgggttccggctacggtcgccttctcggcatcctcatggggcctcacacaaacattgatcaagggctgtttgcagtccttggtgcagcctcactcatggctggatccatgagaatgactgtgtccctttgtgtgatcttccttgaactaaccaacaaccttctcctactaccaataaccatgattgttctcctcatagctaaaactgttggagacagcttcaacccaagcatctatgagatcatattgcacctgaaaggcctccctttcatggatgcaaaccctgagccatggatgagaaacctcactgtgggtgagcttgttgatgtgaagccagcagtggttagcttcaaaggagtagaaaaggtggctaacatagtcaatgccttgaaaaacactacacataatggttttcctgtgatggattgtgggctggtgccaaccacaggagtggccaatgaggctacagaactgcacggaatcattctaagagcacaccttatccaagtgctgaagaagaagtggttcttgaaggagagaaggagaactgaggaatgggaagttagagagaaatttacatgggtggagctggctgagagagaagggaatattgaagatgtggctgtgacaaaagaagaaatggagatgtttgttgatttgcatcctctcaccaatactacacccttcacagtgctagagagtatgtcagttgcaaaagcaatggttctcttcagacaagtaggacttcgccatatgcttgttgtgccaaagtatcaagcttcaggggtatctcctgtgattgggatcctgacccggcaagatctactggcatacaacattctgacagtgtttcctcacctggcaaaatcaaagaggaagtga

SEQ ID NO: 16 - protein, 761 aa, Glycine max
MGEESSLLKESTSINDTNMVEEVEERDPESNPLNEPLLKRNRTLSSNPLALVGAKVSYIESLDYEINENDLFKQDWRSRSRTQVLQYIFWKWTLAFLVGLLTGVIATLINLAVENIAGYKFLAVVNFIQKERYLRGFLYFTGINFLLTFVASILCVCFAPTAAGPGIPEIKAYLNGVDTPNMYGATTLFVKIIGSIGAVSAGLDLGKEGPLAKEALTITGSSGAGYGISTTIVTVAILLLVAPVGGVLFALEEVATWWRSALLWRTFFSTAVVVVVLRASIELCHKGKCGLFGEGGLIMYDVSDVTVRYNVMDIIPVVIIGVLGGVLGSLYNYLLHKVLRVYNLINQKGKMYKLLLSLSVAIFTSACQYGLPFLAKCTPCDPSLSDVCPTNGRSGNFKQFNCPKGYYNDLATLLLTTNDDAVRNIFSTNTPLEYQPSSIIIFFALYCILGLITFGIAVPSGLFLPIILMGSGYGRLLGILMGPHTNIDQGLFAVLGAASLMAGSMRMTVSLCVIFLELTNNLLLLPITMIVLLIAKTVGDSFNPSIYEIILHLKGLPFMDANPEPWMRNLTVGELVDVKPAVVSFKGVEKVANIVNALKNTTHNGFPVMDCGLVPTTGVANEATELHGIILRAHLIQVLKKKWFLKERRRTEEWEVREKFTWVELAEREGNIEDVAVTKEEMEMFVDLHPLTNTTPFTVLESMSVAKAMVLFRQVGLRHMLVVPKYQASGVSPVIGILTRQDLLAYNILTVFPHLAKSKRK

SEQ ID NO: 17 - DNA, 2406 bp, Glycine max
atgctggccaatcatttccaaaacggcatcgaaacggcgaggctcgtttggtcgcggattcctaattcggaagaatcgcagctcctcgacgacgccgttggcatccttaagaagaacgacggaggcggtgtcgagagccttgactatgaagtcattgagaattttgcttatcgtgaggaacaggcgcagagagggaagctgtatgtgagctatttgctggtggtgaaatggttctttgccttgctcattggcatttgtacaggacttgctgctgttgtcatcaatattgctgttgaaaattttgctggctggaagttctcagtgacatttaatataattcagaaatcatatattgctggatttgtcgtatatgtcctgatcaacttggctttggtgttttcctctgtatatattatcacacaatttgcaccagcagctgctggatctggtattcctgaaatcaagggttacttaaatggagttgatattcatggcatccttcttttcagaactttaattggaaagatatttggaagcattggttcagtgggtggaggccttgctctgggtaaagaaggtcctcttgtccatactggtgcttgtattgcttctttgcttggacaaggtggatctactaaatatcatctaaattcaaggtggtttcaagtattcaaaagtgaccgggatcgtcgtgatcttgtaacctgtggatgtgcagctggagttgctgcagcatttagagctccagttggtggtgtattgtttgctttggaagaggttacatcttggtggaggagtcaactcatgtggcgtgtcttcttcacctcggctgttgtggctgttgtggtccgagctgcaatggggtggtgtaagagtggaaaatgtggacactttgggtccggtggattcataatatgggatatatcagatggtcaagaggattattcctttgcagagttatttccaatggctattattggggttattggaggcctactaggctctttattcaaccagcttacactttatattaccacttggcgtcgaaatcatcttcacaagaaagggagcagggtcaagattattgaagcatgccttgtatccattttaacatcagccatttcatttggcttgccacttctaagaaaatgtagtccttgccctgattctgatcttgcatctggtattgaatgcccacgacctcctggaatgtatgggaattatgtaaattttttttgtagcaaagacaaggaatacaatgatctcgcaactattttcttcaacacacaggatgatgccataaggaatttattcagtgcaaaaacaataaatgagtacagttcccaaagtttattaacctttttggttatgttttatgcattagcagtgatcacgtttggtactgctgtgccagctggtcaatttgttcctggtataatgataggatcaacatatgggcgtcttgttggcatgtttgtcgtaaagtattacagaaggctcaacattgaagagggaacgtatgctttgctgggagctgcatcttttcttggaggctcaatgcggatgacagtatctctctgtgtcattatggttgaaatctcaaataacttaaaatttttacctcttattatgcttgttcttcttatatcgaaggctgttggtgatgcttttaacgaaggtatctatgaggagcaagctcaattgaggggcattccattactggaatcaaggcctaaatatgagatgcggaatatgacagcaaaggaagcctgtgggagtggaagggtggtctctttccctcgtgttgttaaggtttctgacgtagtttccattctgcggagcaacaaacacaatggttttccagtgattgatcacacaagaagtggagaaccacttgttattggattagtgcttcgtagtcatttattggtaattctgcagtcaaaggttgatttccagcatagccctttaccctctgatccaagaggtgggggcagatcaattaggcatgattctggtgaatttgcaaagcctgtttctagtaaaggaatatgtattgatgatatacatctaagttcagatgacttagaaatgtacattgatcttgctccatttttgaatccctcaccatatattgtaccagaagatatgtctttgacaaaggtatacaatcttttccgtcaacttggtcttaggcatttatttgttgttcctcgcccatcatgtgtggttggtttgataacaagaaaagatttgttgattgaggacaaagaaaatgtgaatacgttagagcttcagtcaactagtgtaagaattccgcaacagaataaaagattgatgacaagaaatatagatgtggagcgccctttgctaaacggactgcttcaaaatcagatacctgactaa

SEQ ID NO: 18 - protein, 801 aa, Glycine max
MLANHFQNGIETARLVWSRIPNSEESQLLDDAVGILKKNDGGGVESLDYEVIENFAYREEQAQRGKLYVSYLLVVKWFFALLIGICTGLAAVVINIAVENFAGWKFSVTFNIIQKSYIAGFVVYVLINLALVFSSVYIITQFAPAAAGSGIPEIKGYLNGVDIHGILLFRTLIGKIFGSIGSVGGGLALGKEGPLVHTGACIASLLGQGGSTKYHLNSRWFQVFKSDRDRRDLVTCGCAAGVAAAFRAPVGGVLFALEEVTSWWRSQLMWRVFFTSAVVAVVVRAAMGWCKSGKCGHFGSGGFIIWDISDGQEDYSFAELFPMAIIGVIGGLLGSLFNQLTLYITTWRRNHLHKKGSRVKIIEACLVSILTSAISFGLPLLRKCSPCPDSDLASGIECPRPPGMYGNYVNFFCSKDKEYNDLATIFFNTQDDAIRNLFSAKTINEYSSQSLLTFLVMFYALAVITFGTAVPAGQFVPGIMIGSTYGRLVGMFVVKYYRRLNIEEGTYALLGAASFLGGSMRMTVSLCVIMVEISNNLKFLPLIMLVLLISKAVGDAFNEGIYEEQAQLRGIPLLESRPKYEMRNMTAKEACGSGRVVSFPRVVKVSDVVSILRSNKHNGFPVIDHTRSGEPLVIGLVLRSHLLVILQSKVDFQHSPLPSDPRGGGRSIRHDSGEFAKPVSSKGICIDDIHLSSDDLEMYIDLAPFLNPSPYIVPEDMSLTKVYNLFRQLGLRHLFVVPRPSCVVGLITRKDLLIEDKENVNTLELQSTSVRIPQQNKRLMTRNIDVERPLLNGLLQNQIPD

SEQ ID NO: 19 - DNA, 2298 bp, Glycine max
atgtccacgaactactcaaccaatggagactccgaaactctccttcgtcgtcctttgttgtcctcccaaagatccattgtcaactccacgtcccaggttgctattgtcggctccaatgtcagcccaattgagagcctcgactacgagattttcgagaacgagttcttcaagcatgattggaggagcagagggaaggctcagatatttcagttcatgattatgaagtggctcttgtgccttctaattggcatgatcgtttgccttgttggcttctgcaacaatctcgcggttgagaatctcgctggcatcaagtttgtggtcacgtccaacatgatgttggagagaaggtttctgatggcctttttagtattttttgtttcaaatttggttctcacggtttttgcgtgcacaatcacggctttgatagcacctactgccaccggttcaggtatacccgaggtgaaagcttacctgaatggtgtggatgcacctggaatatttactgtacgaactcttcttgttaagattattggaagtattacagcagtgtcatcatcgcttcttattgggaaggcggggcctatggtgcatacaggtgcatgtgtggctgcattgttaggtcagggtgggtcgaagagatatgggttaacatggaaatggttaaagttttttaagaatgaccgagatcggagagatttaataatatgtggatcagcagctggaattgctgctgccttccgtgcccctgttggtggcgtgttgtttgctcttgaagggatgtcatcttggtggagaagtgcccttttgtggagagctttcttcacagcagcaatagttgcaattttgcttcgtgccctgattgatttatgtttaagtggtaaatgtgggttatttggtaaagggggactgataatgttcgatgcttattcagcaagtatttcatatcatttggtggatgttcctcctgtgtttgttcttggtgttatagggggaatacttggcagcttatttaatttgattttgagtaaagttcttcgcatatacaattttatcaatgagaaaggcaccattttcaaaattttgcttgcctgtttaatctccatttttacatcctgtcttctttttggattgccatggttaacatcttgccgaccttgtccgcctgatccatctgagccttgtcctacaataggtcggtctggtatctacaagaaattccagtgcccacctaatcactacaatgatcttgccagcctcattttcaacacaaatgatgacgctattagaaatctatttagcaagaataccgacgatgagtttgagtttaaatcagtgttcatctttttcatcacttgcttttctttaagtatctttagctatggagttgttgctccagctggtctttttgtgccagttattgtgactggtgcatcttatgggcgtattgttggaatgttgcttggcaaaaaggacagtcttagccatggtctttatgctgtacttggtgctgcttcctttctcggtggctccatgaggacaacagtttctttgtgtgtaattattctagaactgaccaataacctgttattgctacccctaatcatgatggtgctgttcatttctaagactgtagcagatgctttcaatgcaaatatatatgacattataatgaaagccaagggtttgccttatttagaaactcatgctgaaccatatatgaggcagctatcagtaggcgatgtagtcacaggcccacttcagacatttaatggggttgagaaggtttgcaacatagtgtttattctcagaactacgggacataatgggtttcccgttatagacgagcctcctatttcgcaagctccagttttatttggcataatcctccgtgaccatcttctcacattgttgaagaagaaagcttttatgtcctcacctatggcaacaagtggtgatgtcatcaatgagttttcagcagatgattttgcaaagaagggttcaagcaaaggtcgtctaaagatagaggatatacagttatcagaggaagagatggacatgttcatagatctacatccatttactaatgcttctccttatactgttgtggagacaatgtcactgggaaaggcccttacacttttccgagagctaggtttaaggcatctgctagtggtacccaagttctccggtagatcacctgtggtgggtatactcacacgacacgatttcatgtcagaacatatattgggtttgcatccctttctggtaagaaacacagggaaaagtttaagattttaa

SEQ ID NO: 20 - protein, 765 aa, Glycine max
MSTNYSTNGDSETLLRRPLLSSQRSIVNSTSQVAIVGSNVSPIESLDYEIFENEFFKHDWRSRGKAQIFQFMIMKWLLCLLIGMIVCLVGFCNNLAVENLAGIKFVVTSNMMLERRFLMAFLVFFVSNLVLTVFACTITALIAPTATGSGIPEVKAYLNGVDAPGIFTVRTLLVKIIGSITAVSSSLLIGKAGPMVHTGACVAALLGQGGSKRYGLTWKWLKFFKNDRDRRDLIICGSAAGIAAAFRAPVGGVLFALEGMSSWWRSALLWRAFFTAAIVAILLRALIDLCLSGKCGLFGKGGLIMFDAYSASISYHLVDVPPVFVLGVIGGILGSLFNLILSKVLRIYNFINEKGTIFKILLACLISIFTSCLLFGLPWLTSCRPCPPDPSEPCPTIGRSGIYKKFQCPPNHYNDLASLIFNTNDDAIRNLFSKNTDDEFEFKSVFIFFITCFSLSIFSYGVVAPAGLFVPVIVTGASYGRIVGMLLGKKDSLSHGLYAVLGAASFLGGSMRTTVSLCVIILELTNNLLLLPLIMMVLFISKTVADAFNANIYDIIMKAKGLPYLETHAEPYMRQLSVGDVVTGPLQTFNGVEKVCNIVFILRTTGHNGFPVIDEPPISQAPVLFGIILRDHLLTLLKKKAFMSSPMATSGDVINEFSADDFAKKGSSKGRLKIEDIQLSEEEMDMFIDLHPFTNASPYTVVETMSLGKALTLFRELGLRHLLVVPKFSGRSPVVGILTRHDFMSEHILGLHPFLVRNTGKSLRF

SEQ ID NO: 21 - DNA, 2229 bp, Glycine max
atgggagaggattctagggagtttggaaaaagcacaaaaatcaatcacaaaatggaagaagttcaaagagaagaagaaatagacccagaaagcaatcccctgaatgagccactactgctcaagaggactcggacactgtcttccaaccctcttgctctggttggagaaaaagtttcctacatagaaagcttggactatgagataaatgagaatgatctattcaagcatgactggaggagcagatcaagagttcaagtgttacaatacatattcttgaaatggttactagcattccttgttggacttctcactggtattatagccactctcatcaatcttgctgttgagaatattgctgggtataagcttctggctgttcttaaatacatccacaaagaaaggtacttgacgggtttcctatatttcacgggcattaatttcgttttgacatttgttgctgctattctctgtgtgtgttttgcacccacagcagcaggacctggaattcctgagatcaaagcttatcttaatggtgttgatactcccaacatgtttggtgccacaacattgattgtcaagataattggaagcattggagctgtctctgcaggtctagatttgggaaaagaaggaccgttggtgcatataggaagctgcattgcttccttactaggccagggaggccctgacaattacaggaccaaatggcactggcttcgatattttaacaatgatcgtgaccgtcgggatcttatcacctgtggttcatcttcaggagtttgtgcagctttccgggctccagtcggtggagttctctttgctcttgaagaggtggcaacctggtggagaagtgctctcctatggagaacttttttcagcacagctgtggtggtagtggtgctcagggccttcattgaaatctgtcatactgggaaatgcggcctttttggtgaaggaggattgatcatgtttgacgtaagcaatgtcacagtgaggtaccatgttatggatatcgtccttgttgtagtcattggaatcattggtggtgtattgggaagcctttacaatcatgtgctacacaaggtcctcagactctacaatctcatcaatcaaaaaggaagaacacataaactcctcctcagtcttgcagttgcactattcacatcaatgtgccaatatggtctcccattcttagcaaaatgcaccccatgtgatccatcacttccagagtcagcctgccccaccaacggacggtctggaaatttcaaacaattcaactgcccccctggctactacaatgatcttgctactctgctgcttaccactaatgatgatgccgttcgaaacatattctcaaccaacactcctcaagaatatcaaccattgtccctcgtaattttctttctactctattgcatattaggactaattacttttggaattgcagtgccatctgggctcttcctcccaatcattctgatgggctcaggttatggccgccttctcggcatctacatgggacctcatacaaacattgaccaagggctgtttgcagtacttggtgcagcctccctcatggctggttccatgaggatgactgtatccctttgtgtgatcttccttgaactcaccaacaatcttctcctactaccaataacaatgattgttctcctaatagccaaaactgttggagacagtttcaacccaagcatctatgagattatactgcacttgaaaggccttcctttcattgatgcaaatcctgagccatggatgagaaatctcactgtgggtgagcttgttgatgtaaagccaccagtggttaccctccatggagtagaaaaagtagccaaaatagtagatgtcttgaaaaacacaacacataatgctttccctgttatggacaatggggtagtaccaccagtagtaggacaggccaatgggggaacagaacttcatggactgattctaagagcacatctcatccaggcaataaagaagaagtggttccttaaagaaagaaggagaacagaggaatgggaagtgagagagaaatttacctgggtagagctggctgagagagaaggaagtattgaagaggtggctgtgaccagtgaggaaatggaaattgctagagagcatatatcccccagtaattgggatcttgacccaggcaagatctacttgcccaaacattctgacagtctttcctcacctggcaaaatctaa

SEQ ID NO: 22 - protein, 742 aa, Glycine max
MGEDSREFGKSTKINHKMEEVQREEEIDPESNPLNEPLLLKRTRTLSSNPLALVGEKVSYIESLDYEINENDLFKHDWRSRSRVQVLQYIFLKWLLAFLVGLLTGIIATLINLAVENIAGYKLLAVLKYIHKERYLTGFLYFTGINFVLTFVAAILCVCFAPTAAGPGIPEIKAYLNGVDTPNMFGATTLIVKIIGSIGAVSAGLDLGKEGPLVHIGSCIASLLGQGGPDNYRTKWHWLRYFNNDRDRRDLITCGSSSGVCAAFRAPVGGVLFALEEVATWWRSALLWRTFFSTAVVVVVLRAFIEICHTGKCGLFGEGGLIMFDVSNVTVRYHVMDIVLVVVIGIIGGVLGSLYNHVLHKVLRLYNLINQKGRTHKLLLSLAVALFTSMCQYGLPFLAKCTPCDPSLPESACPTNGRSGNFKQFNCPPGYYNDLATLLLTTNDDAVRNIFSTNTPQEYQPLSLVIFFLLYCILGLITFGIAVPSGLFLPIILMGSGYGRLLGIYMGPHTNIDQGLFAVLGAASLMAGSMRMTVSLCVIFLELTNNLLLLPITMIVLLIAKTVGDSFNPSIYEIILHLKGLPFIDANPEPWMRNLTVGELVDVKPPVVTLHGVEKVAKIVDVLKNTTHNAFPVMDNGVVPPVVGQANGGTELHGLILRAHLIQAIKKKWFLKERRRTEEWEVREKFTWVELAEREGSIEEVAVTSEEMEIAREHISPSNWDLDPGKIYLPKHSDSLSSPGKI

SEQ ID NO: 23 - DNA, 2322 bp, Glycine max
atggaaaatgttgaaagagaagaagaaatagacccagaaagcaatccactgaatgagccactgctcaagcggaaccggacactgtcttccaaccctcttgctctggttggagaaaaagtttcctacatagaaagcttggactatgagataaatgagaatgatctattcaagcatgactggaggagcagatcaagagttcaagtgttgcagtatatattcttgaaatggttactagcattccttgttggacttctcactggtattatagccactctcatcaatcttgcagttgagaatattgctgggtataagcttctggctgttcttaaatacatccacaaagaaaggtacttgacgggtttcctatatttcacgggcattaatttcgttttgacgtttgttgctgctattctctgtgtgtgttttgcacccacagcagcaggacctggaattcctgaaatcaaagcttatcttaatggtgttgatactcccaacatgtttggtgctacaacattgattgtcaagataattggaagcattggggctgtctctgcaggcctagatttgggaaaagaaggaccgttggtgcatataggaagctgcattgcttccttactaggccagggaggccctgacaattacaggatcaaatggcgctggcttcgatattttaacaatgatcgtgaccgtcgggatcttatcacctgtggttcatcttcgggagtttgtgcagctttccgggctccagttggtggagttctctttgctcttgaagaggtggcaacctggtggagaagtgctctcctgtggagaacttttttcagcacagctgtggtggtggtggtgctcagggccttcattgaaatctgtcatactgggaaatgcggcctttttggtgaaggaggattgatcatgtttgacgtaagcaatgtcacagtgaggtaccatgttatggatattgtccttgttgtagtcattggaatcattggcggggtattgggaagcctttacaatcatgtactacacaaggtcctcagactctacaatctcatcaatcaaaaaggaagaatacataaactcctcctcagtcttgcagttgcactattcacatcaatgtgcgaatatggtctcccattcttagcaaaatgcaccccatgtgatccatcacttccagagtcaacctgccccaccaatggacggtctgggaatttcaaacaatttaactgcccacctggctactacaatgatcttgctactctgctgcttaccactaatgatgatgccgttcgaaatatattctcaactaacacccctcaagaatatcaacccttgtccctcgtaattttctttgtactctattgcatattaggactaatcacttttggaattgctgtgccatctgggctcttcctcccaatcattcttatgggctcaggttatggccgccttctcggcatctacatgggacctcatacaaacattgaccaagggctgtttgcagtactaggtgcagcctccctcatggctggttccatgaggatgactgtatccctttgtgtgatcttccttgaactcaccaacaatcttctcctactaccaataacaatgattgtcctcctaatagccaaaactgttggagacagtttcaacccaagcatctatgagattatactgcacttgaaaggccttcctttcatggatgcaaatcctgagccatggatgagaaatctcactgtgggtgagcttgttgatgtaaagccatcagtggttaccctccatggagtagaaaaggtagccaaaatagtagatgtcttgaaaaacactacacataatgctttccctgttatggacgatggggtagtaccaccagtagtaggacaggccaatgggggaacagaactgcatggactgattctaagagcacatctcatccaagcactaaagaagaagtggttccttaaagaaagaaggagaacagaggaatgggaagtgagagagaaatttacctgggtagagctggctgagagagaaggaagtattgaagaggtggctgtgaccagtgaggaaatggagatgtttgttgatctacatcctcttaccaatacaactccctttacagtgctagagagcatgtcagtagcaaaagcaatgatcctcttcaggcaagttggacttcgccatctgcttgtagtacccaagtatcaagcatctggggtatccccagtaattgggatcttgaccaggcaagatcttcttgcccataacattctgacagtctttcctcacctggcaatatctaagggtagagaaaagaggaattga

SEQ ID NO: 24 - protein, 773 aa, Glycine max
MENVEREEEIDPESNPLNEPLLKRNRTLSSNPLALVGEKVSYIESLDYEINENDLFKHDWRSRSRVQVLQYIFLKWLLAFLVGLLTGIIATLINLAVENIAGYKLLAVLKYIHKERYLTGFLYFTGINFVLTFVAAILCVCFAPTAAGPGIPEIKAYLNGVDTPNMFGATTLIVKIIGSIGAVSAGLDLGKEGPLVHIGSCIASLLGQGGPDNYRIKWRWLRYFNNDRDRRDLITCGSSSGVCAAFRAPVGGVLFALEEVATWWRSALLWRTFFSTAVVVVVLRAFIEICHTGKCGLFGEGGLIMFDVSNVTVRYHVMDIVLVVVIGIIGGVLGSLYNHVLHKVLRLYNLINQKGRIHKLLLSLAVALFTSMCEYGLPFLAKCTPCDPSLPESTCPTNGRSGNFKQFNCPPGYYNDLATLLLTTNDDAVRNIFSTNTPQEYQPLSLVIFFVLYCILGLITFGIAVPSGLFLPIILMGSGYGRLLGIYMGPHTNIDQGLFAVLGAASLMAGSMRMTVSLCVIFLELTNNLLLLPITMIVLLIAKTVGDSFNPSIYEIILHLKGLPFMDANPEPWMRNLTVGELVDVKPSVVTLHGVEKVAKIVDVLKNTTHNAFPVMDDGVVPPVVGQANGGTELHGLILRAHLIQALKKKWFLKERRRTEEWEVREKFTWVELAEREGSIEEVAVTSEEMEMFVDLHPLTNTTPFTVLESMSVAKAMILFRQVGLRHLLVVPKYQASGVSPVIGILTRQDLLAHNILTVFPHLAISKGREKRN

SEQ ID NO: 25 - DNA, 2292 bp, Glycine max
atggaaaatgttgaaagagaagaagaaatagacccagaaagcaatccactgaatgagccactgctcaagcggaaccggacactgtcttccaaccctcttgctctggttggagaaaaagtttcctacatagaaagcttggactatgagataaatgagaatgatctattcaagcatgactggaggagcagatcaagagttcaagtgttgcagtatatattcttgaaatggttactagcattccttgttggacttctcactggtattatagccactctcatcaatcttgcagttgagaatattgctgggtataagcttctggctgttcttaaatacatccacaaagaaaggtacttgacgggtttcctatatttcacgggcattaatttcgttttgacgtttgttgctgctattctctgtgtgtgttttgcacccacagcagcaggacctggaattcctgaaatcaaagcttatcttaatggtgttgatactcccaacatgtttggtgctacaacattgattgtcaagataattggaagcattggggctgtctctgcaggcctagatttgggaaaagaaggaccgttggtgcatataggaagctgcattgcttccttactaggccagggaggccctgacaattacaggatcaaatggcgctggcttcgatattttaacaatgatcgtgaccgtcgggatcttatcacctgtggttcatcttcgggagtttgtgcagctttccgggctccagttggtggagttctctttgctcttgaagaggtggcaacctggtggagaagtgctctcctgtggagaacttttttcagcacagctgtggtggtggtggtgctcagggccttcattgaaatctgtcatactgggaaatgcggcctttttggtgaaggaggattgatcatgtttgacgtaagcaatgtcacagtgaggtaccatgttatggatattgtccttgttgtagtcattggaatcattggcggggtattgggaagcctttacaatcatgtactacacaaggtcctcagactctacaatctcatcaatcatcttgcagttgcactattcacatcaatgtgcgaatatggtctcccattcttagcaaaatgcaccccatgtgatccatcacttccagagtcaacctgccccaccaatggacggtctgggaatttcaaacaatttaactgcccacctggctactacaatgatcttgctactctgctgcttaccactaatgatgatgccgttcgaaatatattctcaactaacacccctcaagaatatcaacccttgtccctcgtaattttctttgtactctattgcatattaggactaatcacttttggaattgctgtgccatctgggctcttcctcccaatcattcttatgggctcaggttatggccgccttctcggcatctacatgggacctcatacaaacattgaccaagggctgtttgcagtactaggtgcagcctccctcatggctggttccatgaggatgactgtatccctttgtgtgatcttccttgaactcaccaacaatcttctcctactaccaataacaatgattgtcctcctaatagccaaaactgttggagacagtttcaacccaagcatctatgagattatactgcacttgaaaggccttcctttcatggatgcaaatcctgagccatggatgagaaatctcactgtgggtgagcttgttgatgtaaagccatcagtggttaccctccatggagtagaaaaggtagccaaaatagtagatgtcttgaaaaacactacacataatgctttccctgttatggacgatggggtagtaccaccagtagtaggacaggccaatgggggaacagaactgcatggactgattctaagagcacatctcatccaagcactaaagaagaagtggttccttaaagaaagaaggagaacagaggaatgggaagtgagagagaaatttacctgggtagagctggctgagagagaaggaagtattgaagaggtggctgtgaccagtgaggaaatggagatgtttgttgatctacatcctcttaccaatacaactccctttacagtgctagagagcatgtcagtagcaaaagcaatgatcctcttcaggcaagttggacttcgccatctgcttgtagtacccaagtatcaagcatctggggtatccccagtaattgggatcttgaccaggcaagatcttcttgcccataacattctgacagtctttcctcacctggcaatatctaagggtagagaaaagaggaattga

SEQ ID NO: 26 - protein, 763 aa, Glycine max
MENVEREEEIDPESNPLNEPLLKRNRTLSSNPLALVGEKVSYIESLDYEINENDLFKHDWRSRSRVQVLQYIFLKWLLAFLVGLLTGIIATLINLAVENIAGYKLLAVLKYIHKERYLTGFLYFTGINFVLTFVAAILCVCFAPTAAGPGIPEIKAYLNGVDTPNMFGATTLIVKIIGSIGAVSAGLDLGKEGPLVHIGSCIASLLGQGGPDNYRIKWRWLRYFNNDRDRRDLITCGSSSGVCAAFRAPVGGVLFALEEVATWWRSALLWRTFFSTAVVVVVLRAFIEICHTGKCGLFGEGGLIMFDVSNVTVRYHVMDIVLVVVIGIIGGVLGSLYNHVLHKVLRLYNLINHLAVALFTSMCEYGLPFLAKCTPCDPSLPESTCPTNGRSGNFKQFNCPPGYYNDLATLLLTTNDDAVRNIFSTNTPQEYQPLSLVIFFVLYCILGLITFGIAVPSGLFLPIILMGSGYGRLLGIYMGPHTNIDQGLFAVLGAASLMAGSMRMTVSLCVIFLELTNNLLLLPITMIVLLIAKTVGDSFNPSIYEIILHLKGLPFMDANPEPWMRNLTVGELVDVKPSVVTLHGVEKVAKIVDVLKNTTHNAFPVMDDGVVPPVVGQANGGTELHGLILRAHLIQALKKKWFLKERRRTEEWEVREKFTWVELAEREGSIEEVAVTSEEMEMFVDLHPLTNTTPFTVLESMSVAKAMILFRQVGLRHLLVVPKYQASGVSPVIGILTRQDLLAHNILTVFPHLAISKGREKRN

SEQ ID NO: 27 - DNA, 2352 bp, Glycine max
atgggtgaggaatccagtttgcttaaagaaagcacatcaatcaatgacaccaatatggtggaagaggttgaagaaagggatccagaaagcaatccattgaatgagccacttctcaagaggaacaggactttgtcttccaatccacttgctcttgttggagcaaaagtttcctacatagaaagcttggactacgagatcaatgagaatgacctgttcaaacaagattggaggagcagatcaagaactcaagtgttgcaatacatattctggaaatggactctggcattccttgttggacttctcactggtgtcatagccactcttatcaatcttgctgttgagaacattgccgggtacaagtttcttgctgttgtcaactttatccaaaaagaaaggtacttgagaggtttcctatatttcacgggcattaatttccttttgacatttgttgcttctattctgtgtgtgtgttttgcacccacggcagctgggcctggaatacctgaaatcaaagcttatcttaatggtgttgatactcccaacatgtatggtgccaccacattgtttgttaagataattggaagcattggagctgtatctgcaggcctagatttaggaaaagaagggccattggtacacattggaagctgcattgcttccttactaggccaaggaggccctgacaattacaggatcaagtggcgctggctacggtatttcaacaacgatcgtgaccgtcgcgatcttattacttgtggtgcttcttcaggggtttgtgcagctttcagggcacctgtgggaggagttctctttgctcttgaagaggtggcaacttggtggagaagtgctctcctctggagaacatttttcagcacagctgtggtggtggtagtgctaagggcctctattgaactttgccacaaaggcaagtgtggtctttttggtgaaggagggctcatcatgtatgatgtgagcgatgtcactgttaggtacaatgtgatggatatcatccctgttgttatcattggagtcctaggtggggtattgggaagcctttacaactatcttctccataaggtcctccgtgtctacaatctcatcaatcagaaaggaaaaatgtacaagctcctcctcagtctttcagttgcaatcttcacatcagcgtgccaatatggtctcccattcctagcaaaatgtaccccttgtgatccatccctctcagatgtgtgccccaccaacgggcgttctggaaacttcaaacaattcaactgcccaaaaggctactacaatgatcttgctactcttcttctgaccaccaatgatgatgctgttagaaacatattctcaaccaacacccctcttgaataccaaccctcctccatcataattttctttgcactgtattgcatactaggactaatcacctttgggattgctgtgccatcagggctcttcctccccatcattctcatgggttccggctacggtcgccttctcggcatcctcatggggcctcacacaaacattgatcaagggctgtttgcagtccttggtgcagcctcactcatggctggatccatgagaatgactgtgtccctttgtgtgatcttccttgaactaaccaacaaccttctcctactaccaataaccatgattgttctcctcatagctaaaactgttggagacagcttcaacccaagcatctatgagatcatattgcacctgaaaggcctccctttcatggatgcaaaccctgagccatggatgagaaacctcactgtgggtgagcttgttgatgtgaagccagcagtggttagcttcaaaggagtagaaaaggtggctaacatagtcaatgccttgaaaaacactacacataatggttttcctgtgatggattgtgggctggtgccaaccacaggagtggccaatgaggctacagaactgcacggaatcattctaagagcacaccttatccaagtgctgaagaagaagtggttcttgaaggagagaaggagaactgaggaatgggaagttagagagaaatttacatgggtggagctggctgagagagaagggaatattgaagatgtggctgtgacaaaagaagaaatggagatgtttgttgatttgcatcctctcaccaatactacacccttcacagtgctagagagtatgtcagttgcaaaagcaatggttctcttcagacaagtaggacttcgccatatgcttgttgtgccaaagtatcaagcttcaggggtatctcctgtgattgggatcctgacccggcaagatctactggcatacaacattctgacagtgtttcctcacctggcaaaatcaaagaggaagtga

SEQ ID NO: 28 - protein, 783 aa, Glycine max
MGEESSLLKESTSINDTNMVEEVEERDPESNPLNEPLLKRNRTLSSNPLALVGAKVSYIESLDYEINENDLFKQDWRSRSRTQVLQYIFWKWTLAFLVGLLTGVIATLINLAVENIAGYKFLAVVNFIQKERYLRGFLYFTGINFLLTFVASILCVCFAPTAAGPGIPEIKAYLNGVDTPNMYGATTLFVKIIGSIGAVSAGLDLGKEGPLVHIGSCIASLLGQGGPDNYRIKWRWLRYFNNDRDRRDLITCGASSGVCAAFRAPVGGVLFALEEVATWWRSALLWRTFFSTAVVVVVLRASIELCHKGKCGLFGEGGLIMYDVSDVTVRYNVMDIIPVVIIGVLGGVLGSLYNYLLHKVLRVYNLINQKGKMYKLLLSLSVAIFTSACQYGLPFLAKCTPCDPSLSDVCPTNGRSGNFKQFNCPKGYYNDLATLLLTTNDDAVRNIFSTNTPLEYQPSSIIIFFALYCILGLITFGIAVPSGLFLPIILMGSGYGRLLGILMGPHTNIDQGLFAVLGAASLMAGSMRMTVSLCVIFLELTNNLLLLPITMIVLLIAKTVGDSFNPSIYEIILHLKGLPFMDANPEPWMRNLTVGELVDVKPAVVSFKGVEKVANIVNALKNTTHNGFPVMDCGLVPTTGVANEATELHGIILRAHLIQVLKKKWFLKERRRTEEWEVREKFTWVELAEREGNIEDVAVTKEEMEMFVDLHPLTNTTPFTVLESMSVAKAMVLFRQVGLRHMLVVPKYQASGVSPVIGILTRQDLLAYNILTVFPHLAKSKRK

SEQ ID NO: 29 - DNA, 2442 bp, Medicago truncatula
atggtgttggcttgggacattgcagtatgctcctcctcaaggtctcaggttcctatggcatcatcaggtgaagttgctaagaagatggataaagaagaaaacgtaaacaatggcgatgatgtgcatgatatagaaaatgacggtagcttggatgggaatgatgaacaaattggaaggtattggtcacagttttctgaaaggaacatgacgtacgaagaaccacttcttgtgaagaggattaacactacctctcagattgctatagttggttccaacctttgccctattgaaagccttgattatgaggtttttgataatgaaatgtttaaccaggactggaggtccaggaagagggttcagatattccaatatgtggtacttaaatgggtatttgctcttcttattggattaggaactggacttgttggtcttttcaataatatttctgtcgagaacatagctggtttcaagctgactcttacaaccgatctcatgtctaaacaaagattttttgaggcttttctagcatatgctggtctcaatatggttttagcagctgcggctgcagcactctgtgctttcattgctccttcagcagcaggctctggcataccggaggttaaagcatatctcaacggcatcgatgctcattctattctggccccaaccaccctttttgtaaagattgttggttcaatccttggagtatctgctggatttgtggtgggaaaagaaggacctatggttcatacaggagcatgcatagcttctattttggggcaaggcggatctaaaaagtatggtttgacttggagttggcttaggtatttcaaaaacgatcgagaccgacgagacatgattacttgtggtgcagctgctggtgtcgctgccgcctttcgatctccagtaggtggtgtcctctttgcccttgaagaagcagcttcttggtggaggagtgctcttctttggaggtcatttttcactacagcagtagttgctattgttttaagagctggaattcagttttgttcaacaggaaaatgtggactatttggtgaaggtggtcttatattgtatgatgttggttcaccccaaacagaatttagtgccggtgacatagtagcagtaatagtcttgggaactgttgccggtattcttggaagcatatataatttcctcgtcgataaggtcgtccgtacatatagcatcatcaatgaaaaaggtccatttttcaaaatctttcttgctgttgcaatttctcttttgacatcatgctgttattatttcttaccatggattgcaaactgtatcccttgtcctaccgattcaaaggtaccatgtccctctgttgacgaatcaggagaatacaaaatctttcaatgtccaccgggatactacaacgatctcgcttccctctttctaaacaccaacgatgacgctattcgtaatctattcagtcctaagataaccaaagagtttcatatttcaagtttgtttatcttctttgccaccgtttactttcttggaatactcacttatggcattgctgttccatctggacttttcattcctgtgatacttgccggggctgcctacggccgcgttgtgagtagactattcgaaccgatcacgcaactcgacagaggattcttttctctcctaggagctgcctccatgctcggtggcaccatgagaatgacagtctcaatttgtgttatattacttgaactcactaatgatctcttgttacttccacttgtgatgttggtcttattaatctcaaaatctgtggccgatatcttcaacaaaggtgtctatgatcaaatcttgaagatcaaaggacttccttatttggaagcacatgccgaaccttacatgaggaatatagctacacgtgatgttgtctcgggtccattgatgaccttttctggcatcgaaaaggttgggaatatattacatgttttgaatactacagggcacaacgggtttccggtcattgacgaaccgccttttgtggatgcaccagagttgtgtggactagtactgaggtcttatttactagttttactaaaggctaaaaattttactagagagaaggtttacgcgaatccgagtatcttagagaatatttctgtgttggattttggaaaggcgggatcaggaaagggagttaaactagaggacttagatatccaagatgaagatttggatatgtatgttgatcttcatccaataactaatacatcgccgtacactgtagttgagactatgtcacttgctaaagccgctattcttttccgccaacatggactcagacacatgtgtgttgttccaaagagccaagggagacctcctattgtcgggattctaacgcgccatgatttcatgccggagcatgttttgggactttaccctgatatcaagcatcacaaatggcactga

SEQ ID NO: 30 - protein, 813 aa, Medicago truncatula
MVLAWDIAVCSSSRSQVPMASSGEVAKKMDKEENVNNGDDVHDIENDGSLDGNDEQIGRYWSQFSERNMTYEEPLLVKRINTTSQIAIVGSNLCPIESLDYEVFDNEMFNQDWRSRKRVQIFQYVVLKWVFALLIGLGTGLVGLFNNISVENIAGFKLTLTTDLMSKQRFFEAFLAYAGLNMVLAAAAAALCAFIAPSAAGSGIPEVKAYLNGIDAHSILAPTTLFVKIVGSILGVSAGFVVGKEGPMVHTGACIASILGQGGSKKYGLTWSWLRYFKNDRDRRDMITCGAAAGVAAAFRSPVGGVLFALEEAASWWRSALLWRSFFTTAVVAIVLRAGIQFCSTGKCGLFGEGGLILYDVGSPQTEFSAGDIVAVIVLGTVAGILGSIYNFLVDKVVRTYSIINEKGPFFKIFLAVAISLLTSCCYYFLPWIANCIPCPTDSKVPCPSVDESGEYKIFQCPPGYYNDLASLFLNTNDDAIRNLFSPKITKEFHISSLFIFFATVYFLGILTYGIAVPSGLFIPVILAGAAYGRVVSRLFEPITQLDRGFFSLLGAASMLGGTMRMTVSICVILLELTNDLLLLPLVMLVLLISKSVADIFNKGVYDQILKIKGLPYLEAHAEPYMRNIATRDVVSGPLMTFSGIEKVGNILHVLNTTGHNGFPVIDEPPFVDAPELCGLVLRSYLLVLLKAKNFTREKVYANPSILENISVLDFGKAGSGKGVKLEDLDIQDEDLDMYVDLHPITNTSPYTVVETMSLAKAAILFRQHGLRHMCVVPKSQGRPPIVGILTRHDFMPEHVLGLYPDIKHHKWH

SEQ ID NO: 31 - DNA, 2286 bp, Medicago truncatula
atggagtcattaacagaggaaaggattgagataagagatgatcacaaacagccgttactcatcagaagcagaattaataactcttctcaactcgccatcgttggagccaatatttgccctattcagagtcttgattacgagttaattgagaatgatctattgaaacaggactggaggtcaagaacaaaggttgagatataccaatatgttgttctgaagtggacccttgcacttcttattggtttaattacaggacttgttgggttctttaataaccttggagttgagaatattgctggtttcaaacttctactcaccaacaatctcatgctcaagcaaaagtaccatgaggcatttgcagtgtacgttggttgtaacatgattttaggggttggtgcggcagccctgtgtgcttacattgctcctgcagctgctggctctggcataccagaggtgaaggcatacctcaacggcattgatgcacattctatattggccccatctaccctctttgtcaagatatttggttcgattttaggagttgctgctggtttcattgtggggaaagaaggacccatggttcatacaggtgcttgcattgctaatttactcggacaaggtggttcgcgtaaatatcgactcacctggaaatggctcagatacttcaaaaatgatagagataggagggatttgatcacgtgcggtgcagctgctggtgttgccgctgccttccgtgcccccgttggtggtgttctgttcgcactcgaagaggcagcttcatggtggaggagtgctcttctgtggcgcacattctttaccactgcagtagtagcagttgttttgaggagtcttatgcagttctgtcatcagggaggaggcagatgtggtctgtttggagaagggggactcatcatgtttgatgttaattctgcaaagcctgcctacaccacacctgacctcctcgcagttatatttcttggagtcattggaggtctcatgggaagcttttacaattatcttgtcgataaagtccttcgcacttacggcgctataaatgagagaggtccaatattcaagattctgctggtgatgattatctcgtttgtaacctcctgtattcgatttgggcttccattgctatcaaagtgtgtgccatgtccaggggagtgtcccagctccccaaccggaggcttctcaatacactacgacaattttcagtgtccaccaaaccactacaatgatctcagctctctatttttcactaccaacgacgatgccatccgcagcctattcaatgatggctccgcctctgctaacaccggatttcagctatcaagtctcataattttcttcgtggcgatatacttgcttggaattgtgacatacggtgttgccattccctctggactcttcattcccgtcatacttgctggagcttcttacgggcgtcttatagggactgtgatggctccattcacagctcttgatacgggtttgtttgctctccttggagccgcatctttccttggtggcacgatgagaatgacagtttctctatgtgtcatacttcttgaactcactaataacttgttgatgctaccattggtcatgttggttctcctcatttctaagacagtggctgattgttttaacaaaggtgtttatgatcagattgtggcgttgaagggactaccttatatggaagcacatgcagagccatacatgaggaatttagttgcaggggatgttgtttctggtccactgttttctttttgtgggatcgaaaaagtggggaatatattgcacgctttgaaagtgacagaacatcacggatttccagtagttgatgagcctcctttgacggatgctcccgagttgtgtgggttggtgttgaggtctcatctttgggtgcttctcaagcacaagacattgttcactagggagagggtgatgacagggtctactattgtgaacaaggttaaggcaagggattttgcaaaaccaggtttgggaagagggataagggtggaggatttggacatttcacaagaggagatggaaatgtatgttgatcttcatccaatcacaaatacttctccatatactgttgttgaaacaatgtctcttgcaaaagctgctcttctgtttcgggagcttggactcaggcatttgctagttgtgcctaagaaaccaggaaggcctccaattgttgggatactgacaaggcatgatttcatgcacgactatatcttgggcctattcccaaacttgaatccccacaagtag

SEQ ID NO: 32 - protein, 761 aa, Medicago truncatula
MESLTEERIEIRDDHKQPLLIRSRINNSSQLAIVGANICPIQSLDYELIENDLLKQDWRSRTKVEIYQYVVLKWTLALLIGLITGLVGFFNNLGVENIAGFKLLLTNNLMLKQKYHEAFAVYVGCNMILGVGAAALCAYIAPAAAGSGIPEVKAYLNGIDAHSILAPSTLFVKIFGSILGVAAGFIVGKEGPMVHTGACIANLLGQGGSRKYRLTWKWLRYFKNDRDRRDLITCGAAAGVAAAFRAPVGGVLFALEEAASWWRSALLWRTFFTTAVVAVVLRSLMQFCHQGGGRCGLFGEGGLIMFDVNSAKPAYTTPDLLAVIFLGVIGGLMGSFYNYLVDKVLRTYGAINERGPIFKILLVMIISFVTSCIRFGLPLLSKCVPCPGECPSSPTGGFSIHYDNFQCPPNHYNDLSSLFFTTNDDAIRSLFNDGSASANTGFQLSSLIIFFVAIYLLGIVTYGVAIPSGLFIPVILAGASYGRLIGTVMAPFTALDTGLFALLGAASFLGGTMRMTVSLCVILLELTNNLLMLPLVMLVLLISKTVADCFNKGVYDQIVALKGLPYMEAHAEPYMRNLVAGDVVSGPLFSFCGIEKVGNILHALKVTEHHGFPVVDEPPLTDAPELCGLVLRSHLWVLLKHKTLFTRERVMTGSTIVNKVKARDFAKPGLGRGIRVEDLDISQEEMEMYVDLHPITNTSPYTVVETMSLAKAALLFRELGLRHLLVVPKKPGRPPIVGILTRHDFMHDYILGLFPNLNPHK

SEQ ID NO: 33 - DNA, 2331 bp, Medicago truncatula
  misc_feature (2328)..(2328): n is a, c, g, or t
atgtccaataaccatctttctaatggagaatccgaacctcttcttcgccgacccttgttatcttctcaaagatccattatcaactcaacttcacaagttgccatcgttggtgccaatgtctgccctattgagagtctcgattatgagatttttgaaaatgaattcttcaagcaggattggagaagtagaggggttgttcagattttgcagtatatatgtatgaagtggctattatgttttatgattggtttaattgttggttttattgggttttgtaacaatcttgctgttgagaatcttgctggtatcaagtttgtcaccacatccaatatgatgttggaaaggaggtttatgtttgccttttttatattttttgcttcaaatttgagtctcacgctttttgcgtcaataataacggcttttatagcacctactgctgctggttcaggcatatcagaggtgaaggcttacctaaatggtgttgatgcacctggaatttttactgtacgaactctctgtgttaagattattggaagtattacagcagtgtcaggctctcttgttattgggaaggcagggcctatggtgcatacaggtgcatgtgtggcagcattgttgggtcagggaggctccaaaagatatggaataacatggagatggttaagattttttaagaacgaccgtgatcgacgggatctaataatatgcggatcagcagctgggattgctgctgctttccgtgcccctgttggcggcgtcttgtttgctcttgaagagatggcatcttggtggagaactgcccttctatggagagctttttttacaacagcaacagttgcaattttccttcgagctatgattgatgtatgtctaagcgacaaatgcggtttattcggtaaagggggactgataatgtttgatgcttattcagcaagtatttcataccatttggtagatgttcctcctgtgtttattcttgctgttgtaggagggttactcggaagcttatttaattttatgacgaacaaagttcttcgcatatacaatgttatcaacgagaaaggcactatatgcagactttttcttgcttgtttaatctccatttttacatcatgtcttctattcggattgccatggcttgcaccatgccgaccttgccctcctgatgctgttgagccttgtccaacaataggtcgatccggtatctacaagaaattccaatgccctcctaatcactacaatggccttgccagtctcatttttaacacaaatgacgatgctatcagaaacctatttagcatgcacactgacaatgaattcgagctttcgtcaatgttggttttttttatcatatgtctctttttaagtatctttagctgtggaattgttgccccggccggtctgtttgtgccaattatcgtgactggtgcatcgtatgggcgcctggttggaatattggttggagaacggaccaatcttagcaatggcctttatgctgtacttggcgccgcttctcttcttggtggatctatgaggacgacggtttctctgtgtgtaattatgctagaactgaccaataacctgttattgcttcccttaataatgatggtgcttgtggtttccaagagtgtagcaaatgttttcaatgcaaatgtatatgaccttataatgaaagccaaaggtttgccctatttagaaactcacgctgaaccatatatgaggcagttaacagtaggtgatgtagtcacaggcccgcttcagatgtttaatggcatagagaaggttcgcaacatagtgtttatccttagaacaacagcacacaatggattccctgttattgatgagcctccgggttcggaagctccgattttattcggtataattcttcgccaccatcttaccacattgttaaagaagaaagctttcttgccatcacctgtggcgaatagttacgatgtcgtgagaaagttttcatcagatgattttgcgaagaagtattcagttgaacgtgtgaagattgaggatatacagttaacggaggaagagatgggcatgttcgttgatctacatccttttactaatgcttcgccttacactgttgtggaaacaatgtcactggcaaaggcacttatactttttcgagaggtcggtttaagacacttgctcgtgatacccaagatacccggtagatcgcccgtggtgggcatattaacacggcatgattttacaccggaacatatattgggtatgcatccttttctggtaaaaagcaggtggaaaagattaagattttggcaaacttttctagaaaaaattctttctggcatntga

SEQ ID NO: 34 - protein, 776 aa, Medicago truncatula
  misc_feature (776)..(776): Xaa can be any naturally occurring amino acid
MSNNHLSNGESEPLLRRPLLSSQRSIINSTSQVAIVGANVCPIESLDYEIFENEFFKQDWRSRGVVQILQYICMKWLLCFMIGLIVGFIGFCNNLAVENLAGIKFVTTSNMMLERRFMFAFFIFFASNLSLTLFASIITAFIAPTAAGSGISEVKAYLNGVDAPGIFTVRTLCVKIIGSITAVSGSLVIGKAGPMVHTGACVAALLGQGGSKRYGITWRWLRFFKNDRDRRDLIICGSAAGIAAAFRAPVGGVLFALEEMASWWRTALLWRAFFTTATVAIFLRAMIDVCLSDKCGLFGKGGLIMFDAYSASISYHLVDVPPVFILAVVGGLLGSLFNFMTNKVLRIYNVINEKGTICRLFLACLISIFTSCLLFGLPWLAPCRPCPPDAVEPCPTIGRSGIYKKFQCPPNHYNGLASLIFNTNDDAIRNLFSMHTDNEFELSSMLVFFIICLFLSIFSCGIVAPAGLFVPIIVTGASYGRLVGILVGERTNLSNGLYAVLGAASLLGGSMRTTVSLCVIMLELTNNLLLLPLIMMVLVVSKSVANVFNANVYDLIMKAKGLPYLETHAEPYMRQLTVGDVVTGPLQMFNGIEKVRNIVFILRTTAHNGFPVIDEPPGSEAPILFGIILRHHLTTLLKKKAFLPSPVANSYDVVRKFSSDDFAKKYSVERVKIEDIQLTEEEMGMFVDLHPFTNASPYTVVETMSLAKALILFREVGLRHLLVIPKIPGRSPVVGILTRHDFTPEHILGMHPFLVKSRWKRLRFWQTFLEKILSGX

SEQ ID NO: 35 - DNA, 2322 bp, Oryza sativa
atggacggccacccctcgccgcgttcacaccaccagccccctccgccagagcgggacggcagcttcaactacgacgaggccggcggcggcccgcgccagccgctgctgcggaagcgcaccatgaacaccacctctcagatcgccatcgtcggcgccaacgtctgccccatcgagagcctcgactacgaaattgtggaaaatgaccttttcaagcaagactggcgatcgagaaagaagaagcagatatttcagtatattgttcttaaatgggccttagttctgcttattggcatgttgactggaattgttggcttctttaacaatcttgcagtcgaaaatattgcaggattaaaactattgctcacaagtgatctcatgctcaagcagaggtacttcacagcatttttggcatatggtggttgtaatctagtcctggcaactactgctgcagcaatctgtgcttacatagcaccagctgctgctggatctggtattcctgaagttaaagcatatcttaatggggttgatgcttattctatattagctcccagtacactatttgtgaagatatttggttcaatacttggagtttcagctggatttgtacttggaaaggaaggacccatggtacatacaggagcatgcatagccaacttgcttggtcaggggggttcacgcaaataccatcttacatggaattggctgagatattttaagaacgacagggataggcgagatttgattacttgtggatcagcagctggagttgcagcagcatttcgtgcaccagttggtggtgtgctctttgctcttgaggaagcagcatcatggtggcgaagtgctcttctatggagaacattctttacaactgctgttgttgctgttgtgttgaggggccttatcgagttctgtcgtagtggaaaatgcggtctctttgggcaaggagggttgattatgtttgatctaagttcaaccatcccgacatacactgcccaagatgttgtggcaataatagtccttggaataattggcggtgtttttggaggccttttcaattttctcttggataggattctccgtgcctacagtattattaatgagagaggccctccattcaagatccttctcaccatgataatatcaatcatcacctcagcatgctcctatgggctcccatggcttgctccttgcacgccgtgccctgctgatgctgcggaggaatgccccaccattggccggtccggaaactttaagaactttcagtgcccaccgggccattacaacggcctcgcgtcgctcttcttcaacacaaacgatgatgccatccgcaacctgttcagcagtggcaccgagaaggagttccatatgtccaccctgttcgtcttcttcaccgccatctactgccttggcctcgtcacctacggtatcgccgttccatctggtctcttcatccctgtgatacttgctggggctacgtacgggcgcatagttgggacacttctgggtcccatatctgatcttgacccaggcctcttcgcactgctcggtgcggcttctttccttggtgggacaatgaggatgacggtatcagtctgcgtgatccttctggagctcacaaatgacctccacatgctccctttggtcatgctcgtccttctgatatccaagaccatagccgatagcttcaacaagggggtctatgatcagattgtggtgatgaaaggcttgccattcatggaggcacatgccgagccgttcatgaggaacctggttgccggtgacgtcgtgtctgggccactcatcaccttctccggggtcgagaaggtggggaacatcgttcacgcgctgaggatcacgggccacaatgggttcccagtggtcgacgagccacctgtatcagaagccccagagctggttgggttggtgcttcggtcccatctgctggttctgctgaaaggcaggtccttcatgaaggagaaggtgaaaaccagcggtagcttcgtgctgcgaaggtttggtgccttcgacttcgccaagccaggctctgggaaaggcctcaagatcgaagacctggatctcaccgatgaggagctggacatgtatgttgatctccatccgattacaaacacctcaccctacacggtggtcgaaacaatgtcacttgcaaaggctgcagtgctcttcagggcactaggattaaggcacctactggtcgtgccaaagaccccaggaaggccccctatagttggaattctcacaaggcacgatttcatgcatgagcatattcatgggctgttcccaaatctcggcaagtcacactaa

SEQ ID NO: 36 - protein, 773 aa, Oryza sativa
MDGHPSPRSHHQPPPPERDGSFNYDEAGGGPRQPLLRKRTMNTTSQIAIVGANVCPIESLDYEIVENDLFKQDWRSRKKKQIFQYIVLKWALVLLIGMLTGIVGFFNNLAVENIAGLKLLLTSDLMLKQRYFTAFLAYGGCNLVLATTAAAICAYIAPAAAGSGIPEVKAYLNGVDAYSILAPSTLFVKIFGSILGVSAGFVLGKEGPMVHTGACIANLLGQGGSRKYHLTWNWLRYFKNDRDRRDLITCGSAAGVAAAFRAPVGGVLFALEEAASWWRSALLWRTFFTTAVVAVVLRGLIEFCRSGKCGLFGQGGLIMFDLSSTIPTYTAQDVVAIIVLGIIGGVFGGLFNFLLDRILRAYSIINERGPPFKILLTMIISIITSACSYGLPWLAPCTPCPADAAEECPTIGRSGNFKNFQCPPGHYNGLASLFFNTNDDAIRNLFSSGTEKEFHMSTLFVFFTAIYCLGLVTYGIAVPSGLFIPVILAGATYGRIVGTLLGPISDLDPGLFALLGAASFLGGTMRMTVSVCVILLELTNDLHMLPLVMLVLLISKTIADSFNKGVYDQIVVMKGLPFMEAHAEPFMRNLVAGDVVSGPLITFSGVEKVGNIVHALRITGHNGFPVVDEPPVSEAPELVGLVLRSHLLVLLKGRSFMKEKVKTSGSFVLRRFGAFDFAKPGSGKGLKIEDLDLTDEELDMYVDLHPITNTSPYTVVETMSLAKAAVLFRALGLRHLLVVPKTPGRPPIVGILTRHDFMHEHIHGLFPNLGKSH

SEQ ID NO: 37 - DNA, 2382 bp, Oryza sativa
atggctgtaggaacagagagtggctcgggcggcgtagccgagagcgccccctcgacgccaatgtcggcaatgacaacaacgcccatatcggcgaggtcggtgaggtgggagagcgacatgccggacatcgaggagggaggcggcgggctggagcggccgctgctgcgccgccgcggcaccaacaccacgtcgcagatggccatcgtcggcgccaacgtctgccccatcgagagcctcgattacgaacttgtggagaatgaagtgtacaagcaggactggagatcaagggggaaattgcaaatcttccactatcagatccttaaatgggtcctagcacttcttgttggattaatagttggcctaataggattcttcaacaacattgccgtcgaaaacatagccgggttcaagctgctcctgacgaccaatctaatgctccagaacaggtacaaggcggcctttctatggtttatcagctgcaatgcaatgttggcagcagccgctgcagcattgtgcgcttactttggcccagcggctgccggatctggcatacctgaggtgaaggcctatctgaatggtgtcgacgcgccgtccatcttagcgcccagtaccctcttcgtcaagattgttgggtctatatttggggtgtctgctgggtttgtgctgggcaaggaaggtcctatggtgcacactggggcttgtgttgcctcctttctaggacaaggcgggtcgcgcaagtatggcttcacttggaattggctcaggtacttcaagaatgatttggaccgcagggatctgatcacctgtggagctgcagcaggagttacagcagccttccgcgcccctgtcggcggtgtcctcttcgcacttgaagaagcaacatcctggtggcggagcgcgcttctctggaggacattctccacgacagcagtggcggcaatggtgctaaggtccctaatagagtactgccgcagcggcaactgtggcctgttcgggaaaggagggctgatcatgttcgacgtaagttcacaggtgacatcatacaccaccatggatctcgccgcggttgtgctgctcgccatcgtcggcgggctacttggagcactcttcaacttcctcctcaatcggatccttcgtgtgtatagctacatcaacgagaaaggcgcgccgtacaagatcattcttacggtggtcatctcgctggtcacctcgtgctgctccttcggcttgccgtggctgacggcgtgcacgccatgcccgccggagctggccgccagcggccactgcccgaccatcggccgctccggcaacttcaagaacttccggtgtccgccggggcagtacaacgccatggcgtcgctgttcctcaacaccaacgacgacgccatccgcaacctcttcagcggcggcacggagagcgagttcggcgtgcccatgctgctcgcgttcttcaccgccgtctactcgctcggcctggtcacctacggcgtggccgtgccgtcgggcctcttcatccccgtgatcctctccggcgcgtcgttcggccggctgctcgggaagctgctcggcgtgctcaccggcctcgacacggggctcttcgcgctgctcggcgcggcgtccttcctcggcgggacgatgcggatgacggtgtcggtgtgcgtcatcctcctggagctcaccaacgacctcctgctgctgccgctcatcatgctggtgctgctcgtctccaagacggtggccgactgcttcaacaagggcgtgtacgagcagatggtgcgcatgaaggggctcccttacctggaggcgcacgccgagccgtgcatgcgcagcctggtcgccggcgacgtcgtgtccgcgccgctcatcgccttctccagcgtcgagagcgtcggcaccgtcgtggacacgctgcgccgcacggggcacaacgggttcccggtgatcgaggacgcgccgttcgcgccggagccggagctgtgcggcctcgtgctgcgctcccacctcctcgtgctcctccgcgccaagaccttcaccgccgaccgcgtcaagaccggcgccgccgaggtgttccgcaagctcgcgccgttcgacttcgccaagcccgggtcgggcaagggcctcaccgtcgacgacctggacctcaccgaggaggagatggccatgtacgtcgacctccacccgatcgccaaccgctcgccgtacaccgtagtggagaacatgtcgctggccaaggccgccgtgctcttccgccagctcggcctccgccacatgtgcgtcgtgccgaggacgccggggaggccgccggtggtcgggatcctgacgcgacacgacttcatgccgggttacatccgcgggttgtttccgaacgtcctccgtgagtag

SEQ ID NO: 38 - protein, 793 aa, Oryza sativa
MAVGTESGSGGVAESAPSTPMSAMTTTPISARSVRWESDMPDIEEGGGGLERPLLRRRGTNTTSQMAIVGANVCPIESLDYELVENEVYKQDWRSRGKLQIFHYQILKWVLALLVGLIVGLIGFFNNIAVENIAGFKLLLTTNLMLQNRYKAAFLWFISCNAMLAAAAAALCAYFGPAAAGSGIPEVKAYLNGVDAPSILAPSTLFVKIVGSIFGVSAGFVLGKEGPMVHTGACVASFLGQGGSRKYGFTWNWLRYFKNDLDRRDLITCGAAAGVTAAFRAPVGGVLFALEEATSWWRSALLWRTFSTTAVAAMVLRSLIEYCRSGNCGLFGKGGLIMFDVSSQVTSYTTMDLAAVVLLAIVGGLLGALFNFLLNRILRVYSYINEKGAPYKIILTVVISLVTSCCSFGLPWLTACTPCPPELAASGHCPTIGRSGNFKNFRCPPGQYNAMASLFLNTNDDAIRNLFSGGTESEFGVPMLLAFFTAVYSLGLVTYGVAVPSGLFIPVILSGASFGRLLGKLLGVLTGLDTGLFALLGAASFLGGTMRMTVSVCVILLELTNDLLLLPLIMLVLLVSKTVADCFNKGVYEQMVRMKGLPYLEAHAEPCMRSLVAGDVVSAPLIAFSSVESVGTVVDTLRRTGHNGFPVIEDAPFAPEPELCGLVLRSHLLVLLRAKTFTADRVKTGAAEVFRKLAPFDFAKPGSGKGLTVDDLDLTEEEMAMYVDLHPIANRSPYTVVENMSLAKAAVLFRQLGLRHMCVVPRTPGRPPVVGILTRHDFMPGYIRGLFPNVLRE

SEQ ID NO: 39 - DNA, 2415 bp, Oryza sativa
atggaggggcagtcgcagcaccgggcgccggagagggaggggagccacaactacgacatcgagagcacggacgggtccggcgggctgtggcggcggaacggctcgtcgtcgggggcgctgctccgctacaacgacagcggcggcggccgcagcgggagcgccggggagccgctgctgcggaagcgcaccatgaacaccacctcccagatcgccatcgtcggcgccaacgtctgccccatcgagagcctcgactacgaagttgttgagaacgaccttttcaagcaagactggcgatcaagaaagaagaagcagatatttcagtacattgttctgaagtggaccttggtgcttcttattggcctgttgactggacttgttggcttcttcaacaatcttgcagttgaaaacattgctggattcaaactgttgctcacgggtaatcttatgctaaaggaaaggtatttaactgcatttttcgcttatggaggttgcaatttggtcttagcagctgcagcggcagcaatatgtgcttacattgcacctgctgctgctgggtctggtattcccgaagttaaagcatatcttaatggagttgatgcatattcaatattggcccccagtacgctctttgtgaagatatttggttcaatacttggagtttcagctggatttgtacttggaaaggaaggtcctatggtacatacaggggcatgtattgccaacttgcttggtcagggaggatcccgcaagtaccggcttacatgtaattggctaagatattttaagaatgacagggataggcgggatttaattacatgcgggtctgcagctggagtggcagctgccttccgtgctcctgttggtggtgtcctatttgctcttgaggaagcagcatcatggtggcgaagtgctcttttgtggagggcgttctttacaacggctgttgttgctgtcgtgttgagatctcttattgagttctgtcgtagtggaaaatgcggtctctttgggcaaggtggattaattatgttcgatctcagttcaactgttgcaacctacagtactccagatctaatagcaataattatccttggaataattggtggaatctttggaggcctttttaattttctcttggacaaggttctccgtgtttacagtatcataaacgagagaggtgctccattcaagatccttctcactataacaatatcaattatcacatcaatgtgctcttatggtctcccttggcttgctgcgtgcactccatgtcccgtggatgctgtggagcaatgtcctaccattggacgctctggtaacttcaagaactttcaatgtccaccagggcattacaatgatcttgcatcactctttttcaatacaaatgatgatgccatccgcaacctctttagcaatgggactgaatctgagttccacatgtccacccttttcatctttttcactgctgtgtactgccttggaattctgacgtacggtgttgccgtcccatccggtctcttcatccctgttattctcgctggtgcaacatacgggcgcatagtggggacacttcttggatccatatccgaccttgatcctggtctttttgcccttcttggtgcagcatcttttcttggtggaacaatgagaatgaccgtgtcagtctgcgtgatccttctagagctcaccaacgacctggccatgctccctctggtcatgcttgttcttctcatatcgaagactatagcagataactttaataaaggagtttatgatcagatagtggtaatgaaaggcttgccatacatggaggctcatgctgaaccatacatgaggcacttggttgctggcgatgttgtgtctggcccacttattacgttttcaggtgtcgagaaggtgggaaacattgtccatgcgttaaggttcacaggccacaatggattcccagtggttgatgagccacctctaacggaagcacctgaattggtcgggctcgtgacaaggtctcatctgttggttttgctgaatggcaagatgttcatgaaagaccagctgaaaactagtggtagctttgtccttcaaagattcggtgcctttgattttgccaagccagggtcagggaaaggcttgaaaattcaggacctggacttcactgatgaggagatggaaatgtatgtggatctccatcccgttacaaacacctcaccttatacggtggttgagacaatgtcactcgcaaaagctgcaatcctattccgtgcactaggattgaggcaccttttggttgtgccaaagacaccagataggccacccattgtcggaattctcacgaggcatgatttcgtcgaagaacatatccacgggctgttcccaaatctcaatcctcacaagttccactcgacatcgatgggaggctga

SEQ ID NO: 40 - protein, 804 aa, Oryza sativa
MEGQSQHRAPEREGSHNYDIESTDGSGGLWRRNGSSSGALLRYNDSGGGRSGSAGEPLLRKRTMNTTSQIAIVGANVCPIESLDYEVVENDLFKQDWRSRKKKQIFQYIVLKWTLVLLIGLLTGLVGFFNNLAVENIAGFKLLLTGNLMLKERYLTAFFAYGGCNLVLAAAAAAICAYIAPAAAGSGIPEVKAYLNGVDAYSILAPSTLFVKIFGSILGVSAGFVLGKEGPMVHTGACIANLLGQGGSRKYRLTCNWLRYFKNDRDRRDLITCGSAAGVAAAFRAPVGGVLFALEEAASWWRSALLWRAFFTTAVVAVVLRSLIEFCRSGKCGLFGQGGLIMFDLSSTVATYSTPDLIAIIILGIIGGIFGGLFNFLLDKVLRVYSIINERGAPFKILLTITISIITSMCSYGLPWLAACTPCPVDAVEQCPTIGRSGNFKNFQCPPGHYNDLASLFFNTNDDAIRNLFSNGTESEFHMSTLFIFFTAVYCLGILTYGVAVPSGLFIPVILAGATYGRIVGTLLGSISDLDPGLFALLGAASFLGGTMRMTVSVCVILLELTNDLAMLPLVMLVLLISKTIADNFNKGVYDQIVVMKGLPYMEAHAEPYMRHLVAGDVVSGPLITFSGVEKVGNIVHALRFTGHNGFPVVDEPPLTEAPELVGLVTRSHLLVLLNGKMFMKDQLKTSGSFVLQRFGAFDFAKPGSGKGLKIQDLDFTDEEMEMYVDLHPVTNTSPYTVVETMSLAKAAILFRALGLRHLLVVPKTPDRPPIVGILTRHDFVEEHIHGLFPNLNPHKFHSTSMGG

SEQ ID NO: 41 - DNA, 2151 bp, Oryza sativa
atggcgcggctggcgtggacgcggctccccaccgccgacggggcgggggcaggggcggaggggcccgggcccgtccctgcctccccctcgtcggcagggtacgagctcttcgccggcggcgtcgagagcctcgactacgaggtcatcgagaactacgcctaccgggaggagcaggcgcagcggagcaagttctgggtgccgtactacgtcatgctcaagtggctgttctccttgctgatcggcgtcggtactggattggctgctatttttattaatctggcggttgaaaacttctccggctggaaatatgctgcaacatttgctataatacagcactcgtattttgttgggttctttgtgtacatagttttcaatttagccctcgtcttctcatctgtatacatagtaacaaacttcgcaccagcagcagctggatctggtattccggagatcaaaggttacttaaatggagtggatacacatggaatcctccttttcaggacattagttgggaagatctttgggagcattggatcagttggaggaggtttggctctaggaaaagaagggcctcttgttcatactggggcatgcatcgcttctcttctgggacagggtggatcagcaaaataccatttgagttctaggtgggtacggatttttgaaagcgaccgagatcggcgagaccttgtgacatgtggatgtgcagctggggttgctgcagcattcagagctccggttggtggggtactatttgccctggaggaagttacatcctggtggcgaagtcatcttatgtggagagtattctttacatctgctgttgtggctgttgtggtgcgatcagcaatgaactggtgcaagagtggaaagtgtggtcattttggatctgggggtttcataatctgggacatatctggaggccaagaagattactcctaccaagaactattgcctatggcaattattggtgttattggtggacttctaggggcattattcaatcaacttaccctgtatataactaaatggcgtcgaacatatcttcacaaaaaggggaaacgagtgaagatctttgaagcatgccttatatctttggttacatccacaatttcctttgtgttgccattgatgaggaaatgcagttcatgtcctcagttagaaactaattctggcatcgaatgccctcggccacctggaacagatgggaattttgtcaatttttattgttctaaagataacgaatacaacgacctagcaaccattttcttcaatactcaggatgatgcaatacgtaatctattcagtgcaaaaacattccatgaatacagtgcacaaagccttatcaccttcctggtcatgttttactccttagctgtcgtgacatttggaaccgctgttccagctggtcaatttgttccaggaataatgatcggatcaacatatggccggcttgttggaatgtttgttgttaagttttataagaagctaaatgttgaggagggcacgtatgctctacttggtgctgcttcctttcttggtggctcaatgagaatgactgtatctttatgtgttataatggttgaaattactaacaacttgaaactcctgccgttaatcatgcttgtgcttctgatttctaaggccgtgggtgacttttttaatgaagggctgtatgaagtgcaagcccaattaaggggcatccctttacttgactcaagacccaaacaggttatgagaaatatgagtgcgaaggatgcctgcaagaatcaaaaggttgtgtcccttcctcgcgtttcaagaattgttgatattatttctgttttgcgaagcaacaagcataatggcttccctgttgttgatcgtgggcagaatggcgagtcacttgtcataggtctgatacttcgtagtcacttacttgtacttctgcaatctaaagtagatttccagaatagtcctttcccttgtggacctggtatactcaacaggcacaatacaagtgactttgttaaaccagcatcgagtaaaggaaagtcaattgatgatattcatttgacagaagatgagctagggctgtatttggatctcgccccatttctaaatccttctccttatatagtgccagaggacatgtccttagcaaaggtatag

SEQ ID NO: 42 - protein, 716 aa, Oryza sativa
MARLAWTRLPTADGAGAGAEGPGPVPASPSSAGYELFAGGVESLDYEVIENYAYREEQAQRSKFWVPYYVMLKWLFSLLIGVGTGLAAIFINLAVENFSGWKYAATFAIIQHSYFVGFFVYIVFNLALVFSSVYIVTNFAPAAAGSGIPEIKGYLNGVDTHGILLFRTLVGKIFGSIGSVGGGLALGKEGPLVHTGACIASLLGQGGSAKYHLSSRWVRIFESDRDRRDLVTCGCAAGVAAAFRAPVGGVLFALEEVTSWWRSHLMWRVFFTSAVVAVVVRSAMNWCKSGKCGHFGSGGFIIWDISGGQEDYSYQELLPMAIIGVIGGLLGALFNQLTLYITKWRRTYLHKKGKRVKIFEACLISLVTSTISFVLPLMRKCSSCPQLETNSGIECPRPPGTDGNFVNFYCSKDNEYNDLATIFFNTQDDAIRNLFSAKTFHEYSAQSLITFLVMFYSLAVVTFGTAVPAGQFVPGIMIGSTYGRLVGMFVVKFYKKLNVEEGTYALLGAASFLGGSMRMTVSLCVIMVEITNNLKLLPLIMLVLLISKAVGDFFNEGLYEVQAQLRGIPLLDSRPKQVMRNMSAKDACKNQKVVSLPRVSRIVDIISVLRSNKHNGFPVVDRGQNGESLVIGLILRSHLLVLLQSKVDFQNSPFPCGPGILNRHNTSDFVKPASSKGKSIDDIHLTEDELGLYLDLAPFLNPSPYIVPEDMSLAKV

SEQ ID NO: 43 - DNA, 2052 bp, Oryza sativa
atgctctccggcgaccaggacctccccgacggcatcgggatggcgcggctggcgtggacgcggctccccaccgccgacggggcgggggcaggggcggaggggcccgggcccgtccctgcctccccctcgtcggcagggtacgagctcttcgccggcggcgtcgagagcctcgactacgaggtcatcgagaactacgcctaccgggaggagcaggcgcagcggagcaagttctgggtgccgtactacgtcatgctcaagtggctgttctccttgctgatcggcgtcggtactggattggctgctatttttattaatctggcggttgaaaacttctccggctggaaatatgctgcaacatttgctataatacagcactcgtattttgttgggttctttgtgtacatagttttcaatttagccctcgtcttctcatctgtatacatagtaacaaacttcgcaccagcagcagctggatctggtattccggagatcaaaggttacttaaatggagtggatacacatggaatcctccttttcaggacattagttgggaagatctttgggagcattggatcagttggaggaggtttggctctaggaaaagaagggcctcttgttcatactggggcatgcatcgcttctcttctgggacagggtggatcagcaaaataccatttgagttctaggtgggtacggatttttgaaagcgaccgagatcggcgagaccttgtgacatgtggatgtgcagctggggttgctgcagcattcagagctccggttggtggggtactatttgccctggaggaagttacatcctggtggcgaagtcatcttatgtggagagtattctttacatctgctgttgtggctgttgtggtgcgatcagcaatgaactggtgcaagagtggaaagtgtggtcattttggatctgggggtttcataatctgggacatatctggaggccaagaagattactcctaccaagaactattgcctatggcaattattggtgttattggtggacttctaggggcattattcaatcaacttaccctgtatataactaaatggcgtcgaacatatcttcacaaaaaggggaaacgagtgaagatctttgaagcatgccttatatctttggttacatccacaatttcctttgtgttgccattgatgaggaaatgcagttcatgtcctcagttagaaactaattctggcatcgaatgccctcggccacctggaacagatgggaattttgtcaatttttattgttctaaagataacgaatacaacgacctagcaaccattttcttcaatactcaggatgatgcaatacgtaatctattcagtgcaaaaacattccatgaatacagtgcacaaagccttatcaccttcctggtcatgttttactccttagctgtcgtgacatttggaaccgctgttccagctggtcaatttgttccaggaataatgatcggatcaacatatggccggcttgttggaatgtttgttgttaagttttataagaagctaaatgttgaggagggcacgtatgctctacttggtgctgcttcctttcttggtggctcaatgagaatgactgtatctttatgtgttataatggttgaaattactaacaacttgaaactcctgccgttaatcatgcttgtgcttctgatttctaaggccgtgggtgacttttttaatgaagggctgtatgaagtgcaagcccaattaaggggcatccctttacttgactcaagacccaaacaggttatgagaaatatgagtgcgaaggatgcctgcaagaatcaaaaggttgtgtcccttcctcgcgtttcaagaattgttgatattatttctgttttgcgaagcaacaagcataatggcttccctgttgttgatcgtgggcagaatggcgagtcacttgtcataggtctgatacttcgtagtcacttacttgtacttctgcaatctaaagtagatttccagaatagtcctttcccttgtggacctggtatactcaacaggtttgtgcttttctatcataagtag

SEQ ID NO: 44 - protein, 683 aa, Oryza sativa
MLSGDQDLPDGIGMARLAWTRLPTADGAGAGAEGPGPVPASPSSAGYELFAGGVESLDYEVIENYAYREEQAQRSKFWVPYYVMLKWLFSLLIGVGTGLAAIFINLAVENFSGWKYAATFAIIQHSYFVGFFVYIVFNLALVFSSVYIVTNFAPAAAGSGIPEIKGYLNGVDTHGILLFRTLVGKIFGSIGSVGGGLALGKEGPLVHTGACIASLLGQGGSAKYHLSSRWVRIFESDRDRRDLVTCGCAAGVAAAFRAPVGGVLFALEEVTSWWRSHLMWRVFFTSAVVAVVVRSAMNWCKSGKCGHFGSGGFIIWDISGGQEDYSYQELLPMAIIGVIGGLLGALFNQLTLYITKWRRTYLHKKGKRVKIFEACLISLVTSTISFVLPLMRKCSSCPQLETNSGIECPRPPGTDGNFVNFYCSKDNEYNDLATIFFNTQDDAIRNLFSAKTFHEYSAQSLITFLVMFYSLAVVTFGTAVPAGQFVPGIMIGSTYGRLVGMFVVKFYKKLNVEEGTYALLGAASFLGGSMRMTVSLCVIMVEITNNLKLLPLIMLVLLISKAVGDFFNEGLYEVQAQLRGIPLLDSRPKQVMRNMSAKDACKNQKVVSLPRVSRIVDIISVLRSNKHNGFPVVDRGQNGESLVIGLILRSHLLVLLQSKVDFQNSPFPCGPGILNRFVLFYHK

SEQ ID NO: 45 - DNA, 2400 bp, Oryza sativa
atggacggccacccctcgccgcgttcacaccaccagccccctccgccagagcgggacggcagcttcaactacgacatagagagcatggacggcggcggcggcgcgtggcgagggcggtacgagtcgtcggaggtgctgctgcggtacgacgacgaggccggcggcggcccgcgccagccgctgctgcggaagcgcaccatgaacaccacctctcagatcgccatcgtcggcgccaacgtctgccccatcgagagcctcgactacgaaattgtggaaaatgaccttttcaagcaagactggcgatcgagaaagaagaagcagatatttcagtatattgttcttaaatgggccttagttctgcttattggcatgttgactggaattgttggcttctttaacaatcttgcagtcgaaaatattgcaggattaaaactattgctcacaagtgatctcatgctcaagcagaggtacttcacagcatttttggcatatggtggttgtaatctagtcctggcaactactgctgcagcaatctgtgcttacatagcaccagctgctgctggatctggtattcctgaagttaaagcatatcttaatggggttgatgcttattctatattagctcccagtacactatttgtgaagatatttggttcaatacttggagtttcagctggatttgtacttggaaaggaaggacccatggtacatacaggagcatgcatagccaacttgcttggtcaggggggttcacgcaaataccatcttacatggaattggctgagatattttaagaacgacagggataggcgagatttgattacttgtggatcagcagctggagttgcagcagcatttcgtgcaccagttggtggtgtgctctttgctcttgaggaagcggcatcatggtggcgaagtgctcttctatggagaacattctttacaactgctgttgttgctgttgtgttgaggggccttatcgagttctgtcgtagtggaaaatgcggtctctttgggcaaggagggttgattatgtttgatctaagttcaaccatcccgacatacactgcccaagatgttgtggcaataatagtccttggaataattggcggtgtttttggaggccttttcaattttctcttggataggattctccgtgcctacagtattattaatgagagaggccctccattcaagatccttctcaccatgataatatcaatcatcacctcagcatgctcctatgggctcccatggcttgctccttgcacgccgtgccctgctgatgctgcggaggaatgccccaccattggccggtccggaaactttaagaactttcagtgcccaccgggccattacaacggcctcgcgtcgctcttcttcaacacaaacgatgatgccatccgcaacctgttcagcagtggcaccgagaaggagttccatatgtccaccctgttcgtcttcttcaccgccatctactgccttggcctcgtcacctacggtatcgccgttccatctggtctcttcatccctgtgatacttgctggggctacgtacgggcgcatagttgggacacttctgggtcccatatctgatcttgacccaggcctcttcgcactgctcggtgcggcttctttccttggtgggacaatgaggatgacggtatcagtctgcgtgatccttctggagctcacaaatgacctccacatgctccctttggtcatgctcgtccttctgatatccaagaccatagccgatagcttcaacaagggggtctatgatcagattgtggtgatgaaaggcttgccattcatggaggcacatgccgagccgttcatgaggaacctggttgccggtgacgtcgtgtctgggccactcatcaccttctccggggtcgagaaggtggggaacatcgttcacgcgctgaggatcacgggccacaatgggttcccagtggtcgacgagccacctgtatcagaagccccagagctggttgggttggtgcttcggtcccatctgctggttctgctgaaaggcaggtccttcatgaaggagaaggtgaaaaccagcggtagcttcgtgctgcgaaggtttggtgccttcgacttcgccaagccaggctctgggaaaggcctcaagatcgaagacctggatctcaccgatgaggagctggacatgtatgttgatctccatccgattacaaacacctcaccctacacggtggtcgaaacaatgtcacttgcaaaggctgcagtgctcttcagggcactaggattaaggcacctactggtcgtgccaaagaccccaggaaggccccctatagttggaattctcacaaggcacgatttcatgcatgagcatattcatgggctgttcccaaatctcggcaagtcacactaa

SEQ ID NO: 46 - protein, 799 aa, Oryza sativa
MDGHPSPRSHHQPPPPERDGSFNYDIESMDGGGGAWRGRYESSEVLLRYDDEAGGGPRQPLLRKRTMNTTSQIAIVGANVCPIESLDYEIVENDLFKQDWRSRKKKQIFQYIVLKWALVLLIGMLTGIVGFFNNLAVENIAGLKLLLTSDLMLKQRYFTAFLAYGGCNLVLATTAAAICAYIAPAAAGSGIPEVKAYLNGVDAYSILAPSTLFVKIFGSILGVSAGFVLGKEGPMVHTGACIANLLGQGGSRKYHLTWNWLRYFKNDRDRRDLITCGSAAGVAAAFRAPVGGVLFALEEAASWWRSALLWRTFFTTAVVAVVLRGLIEFCRSGKCGLFGQGGLIMFDLSSTIPTYTAQDVVAIIVLGIIGGVFGGLFNFLLDRILRAYSIINERGPPFKILLTMIISIITSACSYGLPWLAPCTPCPADAAEECPTIGRSGNFKNFQCPPGHYNGLASLFFNTNDDAIRNLFSSGTEKEFHMSTLFVFFTAIYCLGLVTYGIAVPSGLFIPVILAGATYGRIVGTLLGPISDLDPGLFALLGAASFLGGTMRMTVSVCVILLELTNDLHMLPLVMLVLLISKTIADSFNKGVYDQIVVMKGLPFMEAHAEPFMRNLVAGDVVSGPLITFSGVEKVGNIVHALRITGHNGFPVVDEPPVSEAPELVGLVLRSHLLVLLKGRSFMKEKVKTSGSFVLRRFGAFDFAKPGSGKGLKIEDLDLTDEELDMYVDLHPITNTSPYTVVETMSLAKAAVLFRALGLRHLLVVPKTPGRPPIVGILTRHDFMHEHIHGLFPNLGKSH

SEQ ID NO: 47 - DNA, 2427 bp, Oryza sativa
atggcgccaagggaccagtcatgtggggacggcggcgaggtggatccggagggtggcatcgaggcgccactcctctcctccggctcctcgttcttccaggacccggcgcacgaggacggcgatggcgacgaggaggcgcgacggcggcggcggaggttcctcctcgccggccgctcccagtccaacaccacctcccaggtggccctcgtcggcgtcggcgtgtgccccatcgagagcctcgactacgagttgatcgagaacgaagtgttcaagcaggactggagggcgcgggggcggggtcacatcctgcgctacgtggcgctcaagtgggccctctgcttcctcgtcggcgtcctctccgccgccgccggattcgtcgccaacctcggcgtcgagaacgtcgccggcgccaagttcgtcgtcacctccaatctcatgctcgccggcagatacgggacagcgtttgcggtgttcctggtttcgaatttcgcccttacgatgttagcaacggtgctgacggtgtatgtggcgccggcggcggccgggtcgggcatccctgaggtgaaggcttacttgaacggggttgatgcccccgacatattttctctaaagaccctggtggtgaagattgtgggttgcattgctgcagtatcatcatcattgcatgtgggaaaagctggtcctctagtacacacaggtgcatgcattgcatctatacttggacaaggtgggtcaagtaaatatcacctgacatgtaaatggctaaggtacttcaagaatgatagggaccgaagggaccttgttacttgtggtgctggtgctggtattgctgctgctttccgggcaccagttggtggagtcctgtttgctcttgaagcagtgtcttcatggtggaggagtgccctactctggcgagcatttttcacaacagcaatggttgctgttgtgcttagggcattgatagacttctgcaaaagtgacaagtgtggcttgtttgggaaaggtggacttataatgtttgatgtgacttcagattacatcacctaccatttggtcgatttaccgccagtaatcactctaggagttcttggtggagtactaggaagcttgcacaactttttcctggacaaggttcttcgtctctacaattttattaacgagaaagggcaaaagtacaagctgctcctggctgcagtagtcaccatttgtacatcctgttgtctcttcggcttgccatggattgcttcttgcaaaccttgtccaagtgacaccgaagaagcctgtccatccataggaagatctggtaattttaagaagtatcagtgtgcaatgaatgagtacaatgacttagctagcctgttcttcaacaccaacgatgacaccattagaaacctttacagtgctggcactgatgatgaattccatatctcttcaatacttgtcttcttcttcacatcgtatttcctgggcattttcagctatggccttgctttaccatccggcctttttgtgccagttattttgacaggtgcaacttatggccgccttgttggcatgttaattgggtcccaatcaacattagatcatggcctttttgcagttcttggctctgctgcccttctaggaggatcaatgagaatgactgtctcagtttgtgtcgtcatcctagagctgactaataatttacttatgcttcctttggttatgctggtccttctcatatcgaagacagtggcagatgcttttaatgcaaatatttatgatttgcttgttaaattgaaaggatttccttatctcgaaggccatgttgaaccttacatgaggcaattgtctgtcagtgatgttgtaactggtcctctacaggcattcaatggcatagagaaggttggccatatagtgcatgtcttaaggacaactggacataatggttttcctgttgttgatgagccaccattttcagattctcctgtcttatttggtctagttcttagagcccacttgcttgttctgctgagaaagaaagatttcattcctaactgctcagcttcagcactggatgcttccaagcaattcttgcctcatgattttgctaaacctggctcaggaaagcatgacagaatagaggaaatagaattcagtgcagaagaactggaaatgttcgtagatttgcatccgttcacaaacacgtctccttacactgtggtcgagactatgtctttggctaaggcccatgtgcttttccgcgaagttggattgaggcatcttttggttctaccaaaatcgtctaagagagcgcctgttgtaggcatactgacaaggcacgacttcatgcctgagcatatattgggtcttcatcctttcctcttcaagactagatggaagaaggtgcggtttggcaagtcagcattcaccaacctcgtcttctga

SEQ ID NO: 48 - protein, 808 aa, Oryza sativa
MAPRDQSCGDGGEVDPEGGIEAPLLSSGSSFFQDPAHEDGDGDEEARRRRRRFLLAGRSQSNTTSQVALVGVGVCPIESLDYELIENEVFKQDWRARGRGHILRYVALKWALCFLVGVLSAAAGFVANLGVENVAGAKFVVTSNLMLAGRYGTAFAVFLVSNFALTMLATVLTVYVAPAAAGSGIPEVKAYLNGVDAPDIFSLKTLVVKIVGCIAAVSSSLHVGKAGPLVHTGACIASILGQGGSSKYHLTCKWLRYFKNDRDRRDLVTCGAGAGIAAAFRAPVGGVLFALEAVSSWWRSALLWRAFFTTAMVAVVLRALIDFCKSDKCGLFGKGGLIMFDVTSDYITYHLVDLPPVITLGVLGGVLGSLHNFFLDKVLRLYNFINEKGQKYKLLLAAVVTICTSCCLFGLPWIASCKPCPSDTEEACPSIGRSGNFKKYQCAMNEYNDLASLFFNTNDDTIRNLYSAGTDDEFHISSILVFFFTSYFLGIFSYGLALPSGLFVPVILTGATYGRLVGMLIGSQSTLDHGLFAVLGSAALLGGSMRMTVSVCVVILELTNNLLMLPLVMLVLLISKTVADAFNANIYDLLVKLKGFPYLEGHVEPYMRQLSVSDVVTGPLQAFNGIEKVGHIVHVLRTTGHNGFPVVDEPPFSDSPVLFGLVLRAHLLVLLRKKDFIPNCSASALDASKQFLPHDFAKPGSGKHDRIEEIEFSAEELEMFVDLHPFTNTSPYTVVETMSLAKAHVLFREVGLRHLLVLPKSSKRAPVVGILTRHDFMPEHILGLHPFLFKTRWKKVRFGKSAFTNLVF

SEQ ID NO: 49 - DNA, 2391 bp, Oryza sativa
atggcgtgcacggctccacgggaggaggacctcctcatggaggaagacgagcaccggccgcctctcaaccgggccctgctccaccgcagcgccaccaacaacacctcccaggttgccatggtcggctccaacccctgccccatagagagcctcgattacgagataatagagaacgacctgttcgatcagaactggaggtcgagagggaaagccgaccaggtgcggtacgtggtgctcaagtggaccttctgcttcgccatcggcatcatcaccggcatcgccggcttcgtcatcaacctcgccgtcgagaatgtcgccggcctcaagcacaccgccgtgtccgccctcatggagtccagcagctattggacagcgttctggctgttcgccggaaccaacctggccctgctgctgttcgcgtcgtccatcacggcgttcgtgtcgccggcggccggcgggtcggggatcccggaggtgaaggcctacctcaacggcgtggacgcgccaaacatcttctcgctcaggacactcgctgtcaagataatcggtaacatcgcggccgtgtcatcctcgctgcacgtcggcaaagctggcccaatggtacacacgggcgcgtgcatcgccgccatcttcggccagggcgggtcgcgcaagtacggcctcacctgccgctggctgcgctacttcaagaacgaccgcgaccgccgtgatctcgtcaccataggcgccggcgcaggtgtcaccgcggctttccgcgcccccgtcggcggcgtcctgttcgctctcgaatcactctcgtcatggtggcggagcgcgctgatctggcggtcgttcttcacgacggcggtggtggcggtggtgctgcggatgttcatcgagctgtgcgcgtcggggaagtgcgggctgttcggcaagggtgggctgatcatgtacgacgtcagcaccaagtttgatgacctcatgacctaccacctcaaggacatccccatcgtcgtcctcatcggcgtgatcggcgccatcttgggcgccctctacaacttcctcatgatgaaggtcctgcgcgtctacagcgtgatcaacgagaggggcaacgcgcacaagctgcttctggcggcggtggtgtccatcctgacgtcgtgctgcgtgttcggcctgccgtggctggcgccgtgccggccgtgcccgacagccggggcgccgtcgccgccgaacgggacgtgccattcgctgaaccgattccggcggttccactgcccggcggggcactacaacgacttggccagcctcttcctcaacatcaacgacgacgccatccgcaacctctactccacgggcaccaacgacgtctaccacccgggctccatgctcgcctttttcgtcgcctcctacgcgctcggcgtgctcagctacggcgtcgtcgcgccgtcggggctgttcgtccccatcatcctcaccggcgccacctacggccgcctcgtcgccatgctgctcggcggccgctcaggactcgaccacggcctcgtcgccatcctcggctccgcctccttcctcggcggcacgctccggatgacggtgtccgtgtgcgtcatcatcctggagctcaccaacaacctgctcctcctcccgctcgtcatgctcgtgctgctcatctccaagaccgtcgccgactccttcaactccagcatctacgacctcatcctcaatctcaagggcctcccgcacctcgacggccacgccgagccgtacatgcggcagctcaccgtcggcgacgtggtggccgggccgctgcggagcttcaacggcgtcgagaaggtgggccacatcgtgcacacgctccggaccacggggcaccacgcgttcccggtggtcgacgagccgcccttctcgccggcaccggtgctgtacggcctcgtgctgcgcgcgcacctgctggtactgctcaagaagcgggagttcctgacggcgccggtgcggtgccccaaggactacatggccgggaggttcgaggcgcaggacttcgacaagcgcgggtccgggaagcaggacaccatcgccgacgtggagctgtcgccggaggagatggagatgtacgtcgacctgcaccccttcaccaacacgtcgccgtacacggtggtggagaccatgtcgctggccaaggcgctcgtcctcttccgcgaggtcggcctgcgacacctcctcgtcgtgcccaagtcctgcgacaggtcgccggtggtggggatcctgacgaggcacgacttcatgccggagcacatcctcgggctgcacccggtgctggtgggaagccggtggaagcggctccggtggcagaagggcgccgtcgccaagaaattccggtcgctcctcgactggctagccaacgacagcggctga

SEQ ID NO: 50 - protein, 796 aa, Oryza sativa
MACTAPREEDLLMEEDEHRPPLNRALLHRSATNNTSQVAMVGSNPCPIESLDYEIIENDLFDQNWRSRGKADQVRYVVLKWTFCFAIGIITGIAGFVINLAVENVAGLKHTAVSALMESSSYWTAFWLFAGTNLALLLFASSITAFVSPAAGGSGIPEVKAYLNGVDAPNIFSLRTLAVKIIGNIAAVSSSLHVGKAGPMVHTGACIAAIFGQGGSRKYGLTCRWLRYFKNDRDRRDLVTIGAGAGVTAAFRAPVGGVLFALESLSSWWRSALIWRSFFTTAVVAVVLRMFIELCASGKCGLFGKGGLIMYDVSTKFDDLMTYHLKDIPIVVLIGVIGAILGALYNFLMMKVLRVYSVINERGNAHKLLLAAVVSILTSCCVFGLPWLAPCRPCPTAGAPSPPNGTCHSLNRFRRFHCPAGHYNDLASLFLNINDDAIRNLYSTGTNDVYHPGSMLAFFVASYALGVLSYGVVAPSGLFVPIILTGATYGRLVAMLLGGRSGLDHGLVAILGSASFLGGTLRMTVSVCVIILELTNNLLLLPLVMLVLLISKTVADSFNSSIYDLILNLKGLPHLDGHAEPYMRQLTVGDVVAGPLRSFNGVEKVGHIVHTLRTTGHHAFPVVDEPPFSPAPVLYGLVLRAHLLVLLKKREFLTAPVRCPKDYMAGRFEAQDFDKRGSGKQDTIADVELSPEEMEMYVDLHPFTNTSPYTVVETMSLAKALVLFREVGLRHLLVVPKSCDRSPVVGILTRHDFMPEHILGLHPVLVGSRWKRLRWQKGAVAKKFRSLLDWLANDSG

SEQ ID NO: 51 - DNA, 2283 bp, Oryza sativa
atggcgtgcacggctccacgggaggaggacctcctcatggaggaagacgagcaccggccgcctctcaaccgggccctgctccaccgcagcgccaccaacaacacctcccaggtgcggtacgtggtgctcaagtggaccttctgcttcgccatcggcatcatcaccggcatcgccggcttcgtcatcaacctcgccgtcgagaatgtcgccggcctcaagcacaccgccgtgtccgccctcatggagtccagcagctattggacagcgttctggctgttcgccggaaccaacctggccctgctgctgttcgcgtcgtccatcacggcgttcgtgtcgccggcggccggcgggtcggggatcccggaggtgaaggcctacctcaacggcgtggacgcgccaaacatcttctcgctcaggacactcgctgtcaagataatcggtaacatcgcggccgtgtcatcctcgctgcacgtcggcaaagctggcccaatggtacacacgggcgcgtgcatcgccgccatcttcggccagggcgggtcgcgcaagtacggcctcacctgccgctggctgcgctacttcaagaacgaccgcgaccgccgtgatctcgtcaccataggcgccggcgcaggtgtcaccgcggctttccgcgcccccgtcggcggcgtcctgttcgctctcgaatcactctcgtcatggtggcggagcgcgctgatctggcggtcgttcttcacgacggcggtggtggcggtggtgctgcggatgttcatcgagctgtgcgcgtcggggaagtgcgggctgttcggcaagggtgggctgatcatgtacgacgtcagcaccaagtttgatgacctcatgacctaccacctcaaggacatccccatcgtcgtcctcatcggcgtgatcggcgccatcttgggcgccctctacaacttcctcatgatgaaggtcctgcgcgtctacagcgtgatcaacgagaggggcaacgcgcacaagctgcttctggcggcggtggtgtccatcctgacgtcgtgctgcgtgttcggcctgccgtggctggcgccgtgccggccgtgcccgacagccggggcgccgtcgccgccgaacgggacgtgccattcgctgaaccgattccggcggttccactgcccggcggggcactacaacgacttggccagcctcttcctcaacatcaacgacgacgccatccgcaacctctactccacgggcaccaacgacgtctaccacccgggctccatgctcgcctttttcgtcgcctcctacgcgctcggcgtgctcagctacggcgtcgtcgcgccgtcggggctgttcgtccccatcatcctcaccggcgccacctacggccgcctcgtcgccatgctgctcggcggccgctcaggactcgaccacggcctcgtcgccatcctcggctccgcctccttcctcggcggcacgctccggatgacggtgtccgtgtgcgtcatcatcctggagctcaccaacaacctgctcctcctcccgctcgtcatgctcgtgctgctcatctccaagaccgtcgccgactccttcaactccagcatctacgacctcatcctcaatctcaagggcctcccgcacctcgacggccacgccgagccgtacatgcggcagctcaccgtcggcgacgtggtggccgggccgctgcggagcttcaacggcgtcgagaaggtgggccacatcgtgcacacgctccggaccacggggcaccacgcgttcccggtggtcgacgagccgcccttctcgccggcaccggtgctgtacggcctcgtgctgcgcgcgcacctgctggtactgctcaagaagcgggagttcctgacggcgccggtgcggtgccccaaggactacatggccgggaggttcgaggcgcaggacttcgacaagcgcgggtccgggaagcaggacaccatcgccgacgtggagctgtcgccggaggagatggagatgtacgtcgacctgcaccccttcaccaacacgtcgccgtacacggtggtggagaccatgtcgctggccaaggcgctcgtcctcttccgcgaggtcggcctgcgacacctcctcgtcgtgcccaagtcctgcgacaggtcgccggtggtggggatcctgacgaggcacgacttcatgccggagcacatcctcgggctgcacccggtgctggtgggaagccggtggaagcggctccggtggcagaagggcgccgtcgccaagaaattccggtcgctcctcgactggctagccaacgacagcggctga

SEQ ID NO: 52 - protein, 760 aa, Oryza sativa
MACTAPREEDLLMEEDEHRPPLNRALLHRSATNNTSQVRYVVLKWTFCFAIGIITGIAGFVINLAVENVAGLKHTAVSALMESSSYWTAFWLFAGTNLALLLFASSITAFVSPAAGGSGIPEVKAYLNGVDAPNIFSLRTLAVKIIGNIAAVSSSLHVGKAGPMVHTGACIAAIFGQGGSRKYGLTCRWLRYFKNDRDRRDLVTIGAGAGVTAAFRAPVGGVLFALESLSSWWRSALIWRSFFTTAVVAVVLRMFIELCASGKCGLFGKGGLIMYDVSTKFDDLMTYHLKDIPIVVLIGVIGAILGALYNFLMMKVLRVYSVINERGNAHKLLLAAVVSILTSCCVFGLPWLAPCRPCPTAGAPSPPNGTCHSLNRFRRFHCPAGHYNDLASLFLNINDDAIRNLYSTGTNDVYHPGSMLAFFVASYALGVLSYGVVAPSGLFVPIILTGATYGRLVAMLLGGRSGLDHGLVAILGSASFLGGTLRMTVSVCVIILELTNNLLLLPLVMLVLLISKTVADSFNSSIYDLILNLKGLPHLDGHAEPYMRQLTVGDVVAGPLRSFNGVEKVGHIVHTLRTTGHHAFPVVDEPPFSPAPVLYGLVLRAHLLVLLKKREFLTAPVRCPKDYMAGRFEAQDFDKRGSGKQDTIADVELSPEEMEMYVDLHPFTNTSPYTVVETMSLAKALVLFREVGLRHLLVVPKSCDRSPVVGILTRHDFMPEHILGLHPVLVGSRWKRLRWQKGAVAKKFRSLLDWLANDSG

SEQ ID NO: 53 - DNA, 2409 bp, Oryza sativa
atggcgccaagggaccagtcatgtggggacggcggcgaggtggatccggagggtggcatcgaggcgccactcctctcctccggctcctcgttcttccaggacccggcgcacgaggacggcgatggcgacgaggaggcgcgacggcggcggcggaggttcctcctcgccggccgctcccagtccaacaccacctcccaggtggccctcgtcggcgtcggcgtgtgccccatcgagagcctcgactacgagttgatcgagaacgaagtgttcaagcaggactggagggcgcgggggcggggtcacatcctgcgctacgtggcgctcaagtgggccctctgcttcctcgtcggcgtcctctccgccgccgccggattcgtcgccaacctcggcgtcgagaacgtcgccggcgccaagttcgtcgtcacctccaatctcatgctcgccggcagatacgggacagcgtttgcggtgttcctggtttcgaatttcgcccttacgatgttagcaacggtgctgacggtgtatgtggcgccggcggcggccgggtcgggcatccctgaggtgaaggcttacttgaacggggttgatgcccccgacatattttctctaaagaccctggtggtgaagattgtgggttgcattgctgcagtatcatcatcattgcatgtgggaaaagctggtcctctagtacacacaggtgcatgcattgcatctatacttggacaaggtgggtcaagtaaatatcacctgacatgtaaatggctaaggtacttcaagaatgatagggaccgaagggaccttgttacttgtggtgctggtgctggtattgctgctgctttccgggcaccagttggcggagtcctgtttgctcttgaagcagtgtcttcatggtggaggagtgccctactctggcgagcatttttcacaacagcaatggttgctgttgtgcttagggcattgatagacttctgcaaaagtgacaagtgtggcttgtttgggaaaggtggacttataatgtttgatgtgacttcagattacatcacctaccatttggtcgatttaccgccagtaatcactctaggagttcttggtggagtactaggaagcttgcacaactttttcctggacaagcttactttcaggaaagggcaaaagtacaagctgctcctggctgcagtagtcaccatttgtacatcctgttgtctcttcggcttgccatggattgcttcttgcaaaccttgtccaagtgacaccgaagaagcctgtccatccataggaagatctggtaattttaagaagtatcagtgtgcaatgaatgagtacaatgacttagctagcctgttcttcaacaccaacgatgacaccattagaaacctttacagtgctggcactgatgatgaattccatatctcttcaatacttgtcttcttcttcacatcgtatttcctgggcattttcagctatggccttgctttaccatccggcctttttgtgccagttattttgacaggtgcaacttatggccgccttgttggcatgttaattgggtcccaatcaacattagatcatggcctttttgcagttcttggctctgctgcccttctaggaggatcaatgagaatgactgtctcagtttgtgtcgtcatcctagagctgactaataatttacttatgcttcctttggttatgctggtccttctcatatcgaagacagtggcagatgcttttaatgcaaatatttatgatttgcttgttaaattgaaaggatttccttatctcgaaggccatgttgaaccttacatgaggcaattgtctgtcagtgatgttgtaactggtcctctacaggcattcaatggcatagagaaggttggccatatagtgcatgtcttaaggacaactggacataatggttttcctgttgttgatgagccaccattttcagattctcctgtcttatttggtctagttcttagagcccacttgcttgttctgctgagaaagaaagatttcattcctaactgctcagcttcagcactggatgcttccaagcaattcttgcctcatgattttgctaaacctggctcaggaaagcatgacagaatagaggaaatagaattcagtgcagaagaactggaaatgttcgtagatttgcatccgttcacaaacacgtctccttacactgtggtcgagactatgtctttggctaaggcccatgtgcttttccgcgaagttggattgaggcatcttttggttctaccaaaatcgtctaagagagcgcctgttgtaggcatactgacaaggcacgacttcatgcctgagcatatattgggtcttcatcctttcctcttcaagactagatggaagaaggtgcggtttggcaagtcagcattcaccaacctcgtcttctga

SEQ ID NO: 54 - protein, 802 aa, Oryza sativa
MAPRDQSCGDGGEVDPEGGIEAPLLSSGSSFFQDPAHEDGDGDEEARRRRRRFLLAGRSQSNTTSQVALVGVGVCPIESLDYELIENEVFKQDWRARGRGHILRYVALKWALCFLVGVLSAAAGFVANLGVENVAGAKFVVTSNLMLAGRYGTAFAVFLVSNFALTMLATVLTVYVAPAAAGSGIPEVKAYLNGVDAPDIFSLKTLVVKIVGCIAAVSSSLHVGKAGPLVHTGACIASILGQGGSSKYHLTCKWLRYFKNDRDRRDLVTCGAGAGIAAAFRAPVGGVLFALEAVSSWWRSALLWRAFFTTAMVAVVLRALIDFCKSDKCGLFGKGGLIMFDVTSDYITYHLVDLPPVITLGVLGGVLGSLHNFFLDKLTFRKGQKYKLLLAAVVTICTSCCLFGLPWIASCKPCPSDTEEACPSIGRSGNFKKYQCAMNEYNDLASLFFNTNDDTIRNLYSAGTDDEFHISSILVFFFTSYFLGIFSYGLALPSGLFVPVILTGATYGRLVGMLIGSQSTLDHGLFAVLGSAALLGGSMRMTVSVCVVILELTNNLLMLPLVMLVLLISKTVADAFNANIYDLLVKLKGFPYLEGHVEPYMRQLSVSDVVTGPLQAFNGIEKVGHIVHVLRTTGHNGFPVVDEPPFSDSPVLFGLVLRAHLLVLLRKKDFIPNCSASALDASKQFLPHDFAKPGSGKHDRIEEIEFSAEELEMFVDLHPFTNTSPYTVVETMSLAKAHVLFREVGLRHLLVLPKSSKRAPVVGILTRHDFMPEHILGLHPFLFKTRWKKVRFGKSAFTNLVF

SEQ ID NO: 55 - DNA, 2415 bp, Oryza sativa
atgctctccggcgaccaggacctccccgacggcatcgggatggcgcggctggcgtggacgcggctccccaccgccgacggggcgggggcaggggcggaggggcccgggcccgtccctgcctccccctcgtcggcagggtacgagctcttcgccggcggcgtagagagcctcgactacgaggtcatcgagaactacgcctaccgggaggagcaggcgcagcggagcaagttctgggtgccgtactacgtcatgctcaagtggctgttctccttgctgatcggcgtcggtactggattggatgctatttttattaatctggcggttgaaaacttctccggctggaaatatgctgcaacatttgctataatacagcactcgtattttgttgggttctttgtgtacatagttttcaatttagccctcgtcttctcatctgtatacatagtaacaaacttcgcaccagcagcagctggatctggtattccggagatcaaaggttacttaaatggagtggatacacatggaatcctccttttcaggacattagttgggaagatctttgggagcattggatcagttggaggaggtttggctctaggaaaagaagggcctcttgttcatactggggcatgcatcgcttctcttctgggacagggtggatcagcaaaataccatttgagttctaggtgggtacggatttttgaaagcgaccgagatcggcgagaccttgtgacatgtggatgtgcagctggggttgctgcagcattcagagctccggttggtggggtactatttgccctggaggaagttacatcctggtggcgaagtcatcttatgtggagagtattctttacatctgctgttgtggctgttgtggtgcgatcagcaatgaactggtgcaagagtggaaagtgtggtcattttggatctgggggtttcataatctgggacatatctggaggccaagaagattactcctaccaagaactattgcctatggcaattattggtgttattggtggacttctaggggcattattcaatcaacttaccctgtatataactaaatggcgtcgaacatatcttcacaaaaaggggaaacgagtgaagatctttgaagcatgccttatatctttggttacatccacaatttcctttgtgttgccattgatgaggaaatgcagttcatgtcctcagttagaaactaattctggcatcgaatgccctcggccacctggaacagatgggaattttgtcaatttttattgttctaaagataacgaatacaacgacctagcaaccattttcttcaatactcaggatgatgcaatacgtaatctattcagtgcaaaaacattccatgaatacagtgcacaaagccttatcaccttcctggtcatgttttactccttagctgtcgtgacatttggaaccgctgttccagctggtcaatttgttccaggaataatgatcggatcaacatatggccggcttgttggaatgtttgttgttaagttttataagaagctaaatgttgaggagggcacgtatgctctacttggtgctgcttcctttcttggtggctcaatgagaatgactgtatctttatgtgttataatggttgaaattactaacaacttgaaactcctgccgttaatcatgcttgtgcttctgatttctaaggccgtgggtgacttttttaatgaagggctgtatgaagtgcaagcccaattaaggggcatccctttacttgactcaagacccaaacaggttatgagaaatatgagtgcgaaggatgcctgcaagaatcaaaaggttgtgtcccttcctcgcgtttcaagaattgttgatattatttctgttttgcgaagcaacaagcataatggcttccctgttgttgatcgtgggcagaatggcgagtcacttgtcataggtctgatacttcgtagtcacttacttgtacttctgcaatctaaagtagatttccagaatagtcctttcccttgtggacctggtatactcaacaggcacaatacaagtgactttgttaaaccagcatcgagtaaaggaaagtcaattgatgatattcatttgacagaagatgagctagggctgtatttggatctcgccccatttctaaatccttctccttatatagtgccagaggacatgtccttagcaaaggtgtacaatctcttccgccaactaggattgcgacatatatttgttgttccacggccttctcgtgttgttggattaataacaagacaagatcttttacttgaggagaacggcaataatgtgacaactgagctccagtcgactagtgtaaggggtcagctgaatggcaaaatgctcagtggcagcacacatctggggcatcctcttcttgatagtattgtggttgaggagtaa

SEQ ID NO: 56 - protein, 804 aa, Oryza sativa
MLSGDQDLPDGIGMARLAWTRLPTADGAGAGAEGPGPVPASPSSAGYELFAGGVESLDYEVIENYAYREEQAQRSKFWVPYYVMLKWLFSLLIGVGTGLDAIFINLAVENFSGWKYAATFAIIQHSYFVGFFVYIVFNLALVFSSVYIVTNFAPAAAGSGIPEIKGYLNGVDTHGILLFRTLVGKIFGSIGSVGGGLALGKEGPLVHTGACIASLLGQGGSAKYHLSSRWVRIFESDRDRRDLVTCGCAAGVAAAFRAPVGGVLFALEEVTSWWRSHLMWRVFFTSAVVAVVVRSAMNWCKSGKCGHFGSGGFIIWDISGGQEDYSYQELLPMAIIGVIGGLLGALFNQLTLYITKWRRTYLHKKGKRVKIFEACLISLVTSTISFVLPLMRKCSSCPQLETNSGIECPRPPGTDGNFVNFYCSKDNEYNDLATIFFNTQDDAIRNLFSAKTFHEYSAQSLITFLVMFYSLAVVTFGTAVPAGQFVPGIMIGSTYGRLVGMFVVKFYKKLNVEEGTYALLGAASFLGGSMRMTVSLCVIMVEITNNLKLLPLIMLVLLISKAVGDFFNEGLYEVQAQLRGIPLLDSRPKQVMRNMSAKDACKNQKVVSLPRVSRIVDIISVLRSNKHNGFPVVDRGQNGESLVIGLILRSHLLVLLQSKVDFQNSPFPCGPGILNRHNTSDFVKPASSKGKSIDDIHLTEDELGLYLDLAPFLNPSPYIVPEDMSLAKVYNLFRQLGLRHIFVVPRPSRVVGLITRQDLLLEENGNNVTTELQSTSVRGQLNGKMLSGSTHLGHPLLDSIVVEE

SEQ ID NO: 57 - DNA, 2427 bp, Oryza sativa
atggcgccaagggaccagtcatgtggggacggcggcgaggtggatccggagggtggcatcgaggcgccactcctctcctccggctcctcgttcttccaggacccggcgcacgaggacggcgatggcgacgaggaggcgcgacggcggcggcggaggttcctcctcgccggccgctcccagtccaacaccacctcccaggtggccctcgtcggcgtcggcgtgtgccccatcgagagcctcgactacgagttgatcgagaacgaagtgttcaagcaggactggagggcgcgggggcggggtcacatcctgcgctacgtggcgctcaagtgggccctctgcttcctcgtcggcgtcctctccgccgccgccggattcgtcgccaacctcggcgtcgagaacgtcgccggcgccaagttcgtcgtcacctccaatctcatgctcgccggcagatacgggacagcgtttgcggtgttcctggtttcgaatttcgcccttacgatgttagcaacggtgctgacggtgtatgtggcgccggcggcggccgggtcgggcatccctgaggtgaaggcttacttgaacggggttgatgcccccgacatattttctctaaagaccctggtggtgaagattgtgggttgcattgctgcagtatcatcatcattgcatgtgggaaaagctggtcctctagtacacacaggtgcatgcattgcatctatacttggacaaggtgggtcaagtaaatatcacctgacatgtaaatggctaaggtacttcaagaatgatagggaccgaagggaccttgttacttgtggtgctggtgctggtattgctgctgctttccgggcaccagttggtggagtcctgtttgctcttgaagcagtgtcttcatggtggaggagtgccctactctggcgagcatttttcacaacagcaatggttgctgttgtgcttagggcattgatagacttctgcaaaagtgacaagtgtggcttgtttgggaaaggtggacttataatgtttgatgtgacttcagattacatcacctaccatttggtcgatttaccgccagtaatcactctaggagttcttggtggagtactaggaagcttgcacaactttttcctggacaaggttcttcgtctctacaattttattaacgagaaagggcaaaagtacaagctgctcctggctgcagtagtcaccatttgtacatcctgttgtctcttcggcttgccatggattgcttcttgcaaaccttgtccaagtgacaccgaagaagcctgtccatccataggaagatctggtaattttaagaagtatcagtgtgcaatgaatgagtacaatgacttagctagcctgttcttcaacaccaacgatgacaccattagaaacctttacagtgctggcactgatgatgaattccatatctcttcaatacttgtcttcttcttcacatcgtatttcctgggcattttcagctatggccttgctttaccatccggcctttttgtgccagttattttgacaggtgcaacttatggccgccttgttggcatgttaattgggtcccaatcaacattagatcatggcctttttgcagttcttggctctgctgcccttctaggaggatcaatgagaatgactgtctcagtttgtgtcgtcatcctagagctgactaataatttacttatgcttcctttggttatgctggtccttctcatatcgaagacagtggcagatgcttttaatgcaaatatttatgatttgcttgttaaattgaaaggatttccttatctcgaaggccatgttgaaccttacatgaggcaattgtctgtcagtgatgttgtaactggtcctctacaggcattcaatggcatagagaaggttggccatatagtgcatgtcttaaggacaactggacataatggttttcctgttgttgatgagccaccattttcagattctcctgtcttatttggtctagttcttagagcccacttgcttgttctgctgagaaagaaaaatttcattcctaactgctcagcttcagcactggatgcttccaagcaattcttgcctcatgattttgctaaacctggctcaggaaagcatgacagaatagaggaaatagaattcagtgcagaagaactggaaatgttcgtagatttgcatccgttcacaaacacgtctccttacactgtggtcgagactatgtctttggctaaggcccatgtgcttttccgcgaagttggattgaggcatcttttggttctaccaaaatcgtctaagagagcgcctgttgtaggcatactgacaaggcacgacttcatgcctgagcatatattgggtcttcatcctttcctcttcaagactagatggaagaaggtgcggtttggcaagtcaacattcaccaacctcgtcttctga

SEQ ID NO: 58 - protein, 808 aa, Oryza sativa
MAPRDQSCGDGGEVDPEGGIEAPLLSSGSSFFQDPAHEDGDGDEEARRRRRRFLLAGRSQSNTTSQVALVGVGVCPIESLDYELIENEVFKQDWRARGRGHILRYVALKWALCFLVGVLSAAAGFVANLGVENVAGAKFVVTSNLMLAGRYGTAFAVFLVSNFALTMLATVLTVYVAPAAAGSGIPEVKAYLNGVDAPDIFSLKTLVVKIVGCIAAVSSSLHVGKAGPLVHTGACIASILGQGGSSKYHLTCKWLRYFKNDRDRRDLVTCGAGAGIAAAFRAPVGGVLFALEAVSSWWRSALLWRAFFTTAMVAVVLRALIDFCKSDKCGLFGKGGLIMFDVTSDYITYHLVDLPPVITLGVLGGVLGSLHNFFLDKVLRLYNFINEKGQKYKLLLAAVVTICTSCCLFGLPWIASCKPCPSDTEEACPSIGRSGNFKKYQCAMNEYNDLASLFFNTNDDTIRNLYSAGTDDEFHISSILVFFFTSYFLGIFSYGLALPSGLFVPVILTGATYGRLVGMLIGSQSTLDHGLFAVLGSAALLGGSMRMTVSVCVVILELTNNLLMLPLVMLVLLISKTVADAFNANIYDLLVKLKGFPYLEGHVEPYMRQLSVSDVVTGPLQAFNGIEKVGHIVHVLRTTGHNGFPVVDEPPFSDSPVLFGLVLRAHLLVLLRKKNFIPNCSASALDASKQFLPHDFAKPGSGKHDRIEEIEFSAEELEMFVDLHPFTNTSPYTVVETMSLAKAHVLFREVGLRHLLVLPKSSKRAPVVGILTRHDFMPEHILGLHPFLFKTRWKKVRFGKSTFTNLVF

SEQ ID NO: 59 - DNA, 2322 bp, Oryza sativa
atgtcggcaatgacaacaacgcccatatcggcgaggtcggtgaggtgggagagcgacatgccggacatcgaggagggaggcggcgggctggagcggccgctgctgcgccgccgcggcaccaacaccacgtcgcagatggccatcgtcggcgccaacgtctgccccatcgagagcctcgattacgaacttgtggagaatgaagtgtacaagcaggactggagatcaagggggaaattgcaaatcttccactatcagatccttaaatgggtcctagcacttcttgttggattaatagttggcctaataggattcttcaacaacattgccgtcgaaaacatagccgggttcaagctgctcctgacgaccaatctaatgctccagaacaggtacaaggcggcctttctatggtttatcagctgcaatgcaatgttggcagcagccgctgcagcattgtgcgcttactttggcccagcggctgccggatctggcatacctgaggtgaaggcctatctgaatggtgtcgacgcgccgtccatcttagcgcccagtaccctcttcgtcaagattgttgggtctatatttggggtgtctgctgggtttgtgctgggcaaggaaggtcctatggtgcacactggggcttgtgttgcctcctttctaggacaaggcgggtcgcgcaagtatggcttcacttggaattggctcaggtacttcaagaatgatttggaccgcagggatctgatcacctgtggagctgcagcaggagttacagcagccttccgcgcccctgtcggcggtgtcctcttcgcacttgaagaagcaacatcctggtggcggagcgcgcttctctggaggacattctccacgacagcagtggcggcaatggtgctaaggtccctaatagagtactgccgcagcggcaactgtggcctgttcgggaaaggagggctgatcatgttcgacgtaagttcacaggtgacatcatacaccaccatggatctcgccgcggttgtgctgctcgccatcgtcggcgggctacttggagcactcttcaacttcctcctcaatcggatccttcgtgtgtatagctacatcaacgagaaaggcgcgccgtacaagatcattcttacggtggtcatctcgctggtcacctcgtgctgctccttcggcttgccgtggctgacggcgtgcacgccatgcccgccggagctggccgccagcggccactgcccgaccatcggccgctccggcaacttcaagaacttccggtgtccgccggggcagtacaacgccatggcgtcgctgttcctcaacaccaacgacgacgccatccgcaacctcttcagcggcggcacggagagcgagttcggcgtgcccatgctgctcgcgttcttcaccgccgtctactcgctcggcctggtcacctacggcgtggccgtgccgtcgggcctcttcatccccgtgatcctctccggcgcgtcgttcggccggctgctcgggaagctgctcggcgtgctcaccggcctcgacacggggctcttcgcgctgctcggcgcggcgtccttcctcggcgggacgatgcggatgacggtgtcggtgtgcgtcatcctcctggagctcaccaacgacctcctgctgctgccgctcatcatgctggtgctgctcgtctccaagacggtggccgactgcttcaacaagggcgtgtacgagcagatggtgcgcatgaaggggctcccttacctggaggcgcacgccgagccgtgcatgcgcagcctggtcgccggcgacgtcgtgtccgcgccgctcatcgccttctccagcgtcgagagcgtcggcaccgtcgtggacacgctgcgccgcacggggcacaacgggttcccggtgatcgaggacgcgccgttcgcgccggagccggagctgtgcggcctcgtgctgcgctcccacctcctcgtgctcctccgcgccaagaccttcaccgccgaccgcgtcaagaccggcgccgccgaggtgttccgcaagctcgcgccgttcgacttcgccaagcccgggtcgggcaagggcctcaccgtcgacgacctggacctcaccgaggaggagatggccatgtacgtcgacctccacccgatcgccaaccgctcgccgtacaccgtagtggagaacatgtcgctggccaaggccgccgtgctcttccgccagctcggcctccgccacatgtgcgtcgtgccgaggacgccggggaggccgccggtggtcgggatcctgacgcgacacgacttcatgccgggttacatccgcgggttgtttccgaacgtcctccgtgagtag

SEQ ID NO: 60 - protein, 773 aa, Oryza sativa
MSAMTTTPISARSVRWESDMPDIEEGGGGLERPLLRRRGTNTTSQMAIVGANVCPIESLDYELVENEVYKQDWRSRGKLQIFHYQILKWVLALLVGLIVGLIGFFNNIAVENIAGFKLLLTTNLMLQNRYKAAFLWFISCNAMLAAAAAALCAYFGPAAAGSGIPEVKAYLNGVDAPSILAPSTLFVKIVGSIFGVSAGFVLGKEGPMVHTGACVASFLGQGGSRKYGFTWNWLRYFKNDLDRRDLITCGAAAGVTAAFRAPVGGVLFALEEATSWWRSALLWRTFSTTAVAAMVLRSLIEYCRSGNCGLFGKGGLIMFDVSSQVTSYTTMDLAAVVLLAIVGGLLGALFNFLLNRILRVYSYINEKGAPYKIILTVVISLVTSCCSFGLPWLTACTPCPPELAASGHCPTIGRSGNFKNFRCPPGQYNAMASLFLNTNDDAIRNLFSGGTESEFGVPMLLAFFTAVYSLGLVTYGVAVPSGLFIPVILSGASFGRLLGKLLGVLTGLDTGLFALLGAASFLGGTMRMTVSVCVILLELTNDLLLLPLIMLVLLVSKTVADCFNKGVYEQMVRMKGLPYLEAHAEPCMRSLVAGDVVSAPLIAFSSVESVGTVVDTLRRTGHNGFPVIEDAPFAPEPELCGLVLRSHLLVLLRAKTFTADRVKTGAAEVFRKLAPFDFAKPGSGKGLTVDDLDLTEEEMAMYVDLHPIANRSPYTVVENMSLAKAAVLFRQLGLRHMCVVPRTPGRPPVVGILTRHDFMPGYIRGLFPNVLRE

SEQ ID NO: 61 - DNA, 2406 bp, Oryza sativa
atggacggccacccctcgccgcgttcacaccaccagccccctccgccagagcgggacggcagcttcaactacgacatagagagcatggacggcggcggcggcgcgtggcgagggcggtacgagtcgtcggaggtgctgctgcggtacgacgacgaggccggcggcggcccgcgccagccgctgctgcggaagcgcaccatgaacaccacctctcagatcgccatcgtcggcgccaacgtctgccccatcgagagcctcgactacgaaattgtggaaaatgaccttttcaagcaagactggcgatcgagaaagaagaagcagatatttcagtatattgttcttaaatgggccttagttctgcttattggcatgttgactggaattgttggcttctttaacaatcttgcagtcgaaaatattgcaggattaaaactattgctcacaagtgatctcatgctcaagcagaagtgcaggtacttcacagcatttttggcatatggtggttgtaatctagtcctggcaactactgctgcagcaatctgtgcttacatagcaccagctgctgctggatctggtattcctgaagttaaagcatatcttaatggggttgatgcttattctatattacctcccaatacactatttgtgaagatatttggttcaatacttggagtttcagctggatttgtacttggaaaggaaggacccatggtacatacaggagcatgcatagccaacttgcttggtcaggggggttcacgcaaataccatcttacatggaattggctgagatattttaagaacgacagggataggcgagatttgattacttgtggatcagcagctggagttgcagcagcatttcgtgcaccagttggtggtgtgctctttgctcttgaggaagcagcatcatggtggcgaagtgctcttctatggagaacattctttacaactgctgttgttgctgttgtgttgaggggccttatcgagttctgtcgtagtggaaaatgcggtctctttgggcaaggagggttgattatgtttgatctaagttcaaccatcccgacatacactgcccaagatgttgtggcaataatagtccttggaataattggcggtgtttttggaggccttttcaattttctcttggataggattctccgtgcctacagtattattaatgagagaggccctccattcaagatccttctcaccatgataatatcaatcatcacctcagcatgctcctatgggctcccatggcttgctccttgcacgccgtgccctgctgatgctgcggaggaatgccccaccattggccggtccggaaactttaagaactttcagtgcccaccgggccattacaacggcctcgcgtcgctcttcttcaacacaaacgatgatgccatccgcaacctgttcagcagtggcaccgagaaagagttccatatgtccaccctgttcgtcttcttcaccgccatctactgccttggcctcgtcacctacggtatcgccgttccatctggtctcttcatccctgtgatacttgctggggctacgtacgggcgcatagttgggacacttctgggtcccatatctgatcttgacccaggcctcttcgcactgctcggtgcggcttctttccttggtgggacaatgaggatgacggtatcagtctgcgtgatccttctggagctcacaaatgacctccacatgctccctttggtcatgctcgtccttctgatatccaagaccatagccgatagcttcaacaagggggtctatgatcagattgtggtgatgaaaggcttgccattcatggaggcacatgccgagccgttcatgaggaacctggttgccggtgacgtcgtgtctgggccactcatcaccttctccggggtcgagaaggtggggaacatcgttcacgcgctgaggatcacgggccacaatgggttcccagtggtcgacgagccacctgtatcagaagccccagagctggttgggttggtgcttcggtcccatctgctggttctgctgaaaggcaggtccttcatgaaggagaaggtgaaaaccagcggtagcttcgtgctgcgaaggtttggtgccttcgacttcgccaagccaggctctgggaaaggcctcaagatcgaagacctggatctcaccgatgaggagctggacatgtatgttgatctccatccgattacaaacacctcaccctacacggtggtcgaaacaatgtcacttgcaaaggctgcagtgctcttcagggcactaggattaaggcacctactggtcgtgccaaagaccccaggaaggccccctatagttggaattctcacaaggcacgatttcatgcatgagcatattcatgggctgttcccaaatctcggcaagtcacactaa

SEQ ID NO: 62 - protein, 801 aa, Oryza sativa
MDGHPSPRSHHQPPPPERDGSFNYDIESMDGGGGAWRGRYESSEVLLRYDDEAGGGPRQPLLRKRTMNTTSQIAIVGANVCPIESLDYEIVENDLFKQDWRSRKKKQIFQYIVLKWALVLLIGMLTGIVGFFNNLAVENIAGLKLLLTSDLMLKQKCRYFTAFLAYGGCNLVLATTAAAICAYIAPAAAGSGIPEVKAYLNGVDAYSILPPNTLFVKIFGSILGVSAGFVLGKEGPMVHTGACIANLLGQGGSRKYHLTWNWLRYFKNDRDRRDLITCGSAAGVAAAFRAPVGGVLFALEEAASWWRSALLWRTFFTTAVVAVVLRGLIEFCRSGKCGLFGQGGLIMFDLSSTIPTYTAQDVVAIIVLGIIGGVFGGLFNFLLDRILRAYSIINERGPPFKILLTMIISIITSACSYGLPWLAPCTPCPADAAEECPTIGRSGNFKNFQCPPGHYNGLASLFFNTNDDAIRNLFSSGTEKEFHMSTLFVFFTAIYCLGLVTYGIAVPSGLFIPVILAGATYGRIVGTLLGPISDLDPGLFALLGAASFLGGTMRMTVSVCVILLELTNDLHMLPLVMLVLLISKTIADSFNKGVYDQIVVMKGLPFMEAHAEPFMRNLVAGDVVSGPLITFSGVEKVGNIVHALRITGHNGFPVVDEPPVSEAPELVGLVLRSHLLVLLKGRSFMKEKVKTSGSFVLRRFGAFDFAKPGSGKGLKIEDLDLTDEELDMYVDLHPITNTSPYTVVETMSLAKAAVLFRALGLRHLLVVPKTPGRPPIVGILTRHDFMHEHIHGLFPNLGKSH

SEQ ID NO: 63 - DNA, 2406 bp, Physcomitrella patens
atgggtgggaatgatgaaatgggaaatgtggaggaggagagcctgccgcctccgcaccttgatctgtacgagccgctcctggagaaggagaaggttgctacagctggtaacgcaaatgggaacgtcatcaatggtacccatcacacggcgatgatcggcacaagggttgcacctattgagagtcttgattatgaactcgttgagaacgagctattcagacaagactggcgttccaggaaaaaacgagagatcttacagtatgtcgcggtgaagtggacatttgtgtttcttgtcggcattttaactgctattgctgccttggggatcaacactgccgtggagaacattgctggagtgaaatttctgcttacagttaaattcatggagtcaaacaggtttgtatgggcgtttttggtctacgccggtttcaatgtgatgttggtcatgagtgctgcgctcctatgtgtgtacataggcccttcagcagcaggttcaggtattccagaagtcaaggcttatcttaatggagtcgatacgcccaacatattctcaattaagactcttgttgtcaaggcaacattgattcttggaagcataggatccgtagctggtggtttaattgtgggaaaagaaggtccacttgtgcatgtgggctcctgcattgcttcattacttggtcagggagggtctgtgaaatatggtttgacctgtaaatggttacgatacctgaaaaacgatcgtgatcggcgagatttggtgacttgtggagcagctgctggagttgcagcggcttttcgtgcacctgtaggaggggtgttatttgcactagaagaagttacctcttggtggcgaggtcctctattatggagggcatttttcaccacggcagtagttgctgtagtgatacgcaccggaattgcttggtgtaagcaaggacactgtggcatggctggtgaaggtggcttgatcatttttgacgtaagtggagtgcaagaaagctatgggctgagagaactttcctcagtggctgtttcgggagtgctagggggtgtgcttggcagcctcttcaaccagattaatgctaagattatcgtttggagtggcacgtggcttaagaagaagggaaagttcgctaaaattatccaggcgatccttattgctctcgtcacctcaatttgcagttttggacttccatttcttgctaaatgtcaaccttgtccagaccatcttactattcctggagaaaaggcgtgtcctacctacggccgtgctggcaacttcaagaatttccactgccccgatggtagttacaacgatttggcaggccttttctttaacacaaatgaggatagtgtgagaaatttgttcagcaaggggactaatggagagtttcagttcagctccctttttgtatatctgacatccgcatattcacttgcgcttctcacatatggtactgcggtaccgtctgggctgtttgtcccggctattctgtgtggggctacatatggcagaattgtcggcatgattatgggatcattttacgtaaatggtcatatggatgagggggtttacgctctcctaggagcagcatcattccttggaggctccatgcggatgactgtctccctttgcattatattgctggagctgacaaataatttgctgttgcttcctctgatcatgctcgtgttgttgatatcgaagaccgtgggagatgctttcaacgatggtctttactctctgcatgtgcatatcaaggggattcctttccttgaagctcatcctcctcaatttatgagccatctgactgcacgcgatgctattactcgaccgttgatttggttttcgaaagttgaacgtgttggaacaattgctgaggttttgcgtagcacaaatcatcacgcttttcctgtagtggatgacgacgttgaatgtagtgggaaaccagtattttttggccttgttctgaggtctcatttattggtcttgctgaagaagaaggagtttgctaaaaataggctctctcgatctgaagtgcaaagcagtcgcgttacggcagctgaatttgccaaacctggctctggcaaggggctaaccatttcagatattgagttgaccgtagtggaagaggagatgttccttgatttgacgggtattgccaatacttctccgtatacagttgttcacaccatgtctttagcgaaggcttacacattgtttcgacagctcggactccgccatctttgtgtcatgccaagggcttctgagggtcaacctataattggattattgacacgacatgattttatgtcagcatatcttctgaacctctatcctcacttacgacagaacaattacacaaagattcaagcttttacctccaaaagagatgaacagctgtag

SEQ ID NO: 64 - protein, 801 aa, Physcomitrella patens
MGGNDEMGNVEEESLPPPHLDLYEPLLEKEKVATAGNANGNVINGTHHTAMIGTRVAPIESLDYELVENELFRQDWRSRKKREILQYVAVKWTFVFLVGILTAIAALGINTAVENIAGVKFLLTVKFMESNRFVWAFLVYAGFNVMLVMSAALLCVYIGPSAAGSGIPEVKAYLNGVDTPNIFSIKTLVVKATLILGSIGSVAGGLIVGKEGPLVHVGSCIASLLGQGGSVKYGLTCKWLRYLKNDRDRRDLVTCGAAAGVAAAFRAPVGGVLFALEEVTSWWRGPLLWRAFFTTAVVAVVIRTGIAWCKQGHCGMAGEGGLIIFDVSGVQESYGLRELSSVAVSGVLGGVLGSLFNQINAKIIVWSGTWLKKKGKFAKIIQAILIALVTSICSFGLPFLAKCQPCPDHLTIPGEKACPTYGRAGNFKNFHCPDGSYNDLAGLFFNTNEDSVRNLFSKGTNGEFQFSSLFVYLTSAYSLALLTYGTAVPSGLFVPAILCGATYGRIVGMIMGSFYVNGHMDEGVYALLGAASFLGGSMRMTVSLCIILLELTNNLLLLPLIMLVLLISKTVGDAFNDGLYSLHVHIKGIPFLEAHPPQFMSHLTARDAITRPLIWFSKVERVGTIAEVLRSTNHHAFPVVDDDVECSGKPVFFGLVLRSHLLVLLKKKEFAKNRLSRSEVQSSRVTAAEFAKPGSGKGLTISDIELTVVEEEMFLDLTGIANTSPYTVVHTMSLAKAYTLFRQLGLRHLCVMPRASEGQPIIGLLTRHDFMSAYLLNLYPHLRQNNYTKIQAFTSKRDEQL

SEQ ID NO: 65 - DNA, 2175 bp, Physcomitrella patens
atgttgggatatcgggacccgggtatggagagtcttgattatgaggtcgtggaaagcgtcgcttatcgagaggatcaggcacaacgaggaatttggcatcatgcttcctacataaccctgaaatggaccttttctctgctcattggtatagggacagggcttgccgcctttcttatcaatattgcagtagaaaatttctcgggatggaagtttgcggcaacatttgctcttatgaaatatagcacctttttaggtttagtaatctacattgcatttaatgcagctttagtattttcatctgtttacatcatcactcaatttgctcccgctgcagcagggtcaggcattccagagatcaaggcttatttaaatggtgttgatactcctggtattctcttgtttcggacgttgattggaaaggtgctaggtagtattggttctgttggaggagggttggctttgggcaaggaggggcctctagttcacacgggtgcctgtattgcatcagtacttgggcaggcaatgcagggcggctcaacaaagtaccatgtgaattggagatggcttcggaggtttaagaatgatcgtgatcgtcgtgatcttgtaacatgtgggtgtgctgctggagtagcggcagctttcagagcccctgttgggggtgtcttgtttgctcttgaggaggtcacttcttggtggaggagtcagcttttatggcgggtttttttcacatcagctgtggttgccgttgtggtgaggactgcgatgggttggtgcaagcatggaaattgtggacattttggttcaggtggatttatcatatgggatatttcagggggtcaggacgattattcattttttgagcttttacctatggccatgcttggtgcaattggaggacttctgggggcacttttcaaccagcttactatctggatctcaacctggagaaggaatgtgttgcacagaagaggcactcgtgttaagattattgaggttctcctggtatcattgataacatcgatgttatcatttggtttgccaatgatgactacctgtaaaccgtgccctgatccagtgaagtacccaagtgttatctgtccccgcccctcgggcaactacggcaattatgtcaatttcttttgtccaaacgagaaccagtacaacgaccttgccacaatcttttttaatacgcaggatgatgcaatcagaaaccttttcagcaccaacaccccacatgaatactccactcgtagcctcttgaccttcctggtgatgtttttcgtgctagcagtgctgacatacggaacagctgttccatcagggcagtttgttccaggtattatgattggtgccacttacgggcgacttgtcggcattttggttgtcaatgcttcgagtaaggatagtgttgacgaaggaacgtatgctttgctgggggctgcctcatttctgggcggctcaatgcggatgaccgtgtcactctgtgttatcatggtcgagattactaataatcttcaactacttccactcattatgttggtcctccttatttctaaggctgttggagatgctttcaatagtgggttttatgaggaacaggtcaagcttcgaagtcttcctcttcttgagtcaaggccgcaacgtttcatgcggaatttggctgccaaagatgcttctggtacaagaaagattgtgcagttctcaagggtgtcgaaagttggccatattgtagccgtcttacgaagcaccaatcataatggcttcccagttgttgataagcttcagacaggagagcctgtcgtcattggtcttattttaaggagctatttactggttcttcttcaagccaaaacggattttcagcgtactcctactctaggagatactcgcgatagaagaaatttcagatatgatgtgagagattttacaaagccagtatcgagcaaaggtatctccatttacgacattgatatcagcgcccaagagatggagatgtacatcgacttgcaaccatttgtgaatcccacaccttacattgttcctgaggacatgtctctcacaaaagtgtataatttatttcggcagcttgggttgcggcatatatgcgttgtgccacgaccttcacaagttgtgggagtaatcacacggaaggatttattaccagaggcgagttaa

SEQ ID NO: 66 - protein, 724 aa, Physcomitrella patens
MLGYRDPGMESLDYEVVESVAYREDQAQRGIWHHASYITLKWTFSLLIGIGTGLAAFLINIAVENFSGWKFAATFALMKYSTFLGLVIYIAFNAALVFSSVYIITQFAPAAAGSGIPEIKAYLNGVDTPGILLFRTLIGKVLGSIGSVGGGLALGKEGPLVHTGACIASVLGQAMQGGSTKYHVNWRWLRRFKNDRDRRDLVTCGCAAGVAAAFRAPVGGVLFALEEVTSWWRSQLLWRVFFTSAVVAVVVRTAMGWCKHGNCGHFGSGGFIIWDISGGQDDYSFFELLPMAMLGAIGGLLGALFNQLTIWISTWRRNVLHRRGTRVKIIEVLLVSLITSMLSFGLPMMTTCKPCPDPVKYPSVICPRPSGNYGNYVNFFCPNENQYNDLATIFFNTQDDAIRNLFSTNTPHEYSTRSLLTFLVMFFVLAVLTYGTAVPSGQFVPGIMIGATYGRLVGILVVNASSKDSVDEGTYALLGAASFLGGSMRMTVSLCVIMVEITNNLQLLPLIMLVLLISKAVGDAFNSGFYEEQVKLRSLPLLESRPQRFMRNLAAKDASGTRKIVQFSRVSKVGHIVAVLRSTNHNGFPVVDKLQTGEPVVIGLILRSYLLVLLQAKTDFQRTPTLGDTRDRRNFRYDVRDFTKPVSSKGISIYDIDISAQEMEMYIDLQPFVNPTPYIVPEDMSLTKVYNLFRQLGLRHICVVPRPSQVVGVITRKDLLPEAS

SEQ ID NO: 67 - DNA, 2232 bp, Populus trichocarpa
atgttgagagagccatttcttgttaggaatagaaagaacaatacttcacagattgccattgttggtgctaatacctgccccatcgaaagccttgattatgagattgctgagaatgaacttttgaaacaggactggagatctcgaaagaaggctgagatatttcagtatgttgtcctcaagtggacacttgctctcctcattgggttaggtacagggcttgtcggctttttcaataaccttgccattgagaatatagctggtttcaaacttctggtgacaaacaatctcatgcttaaggagatgtactatcaggcatttgcaacttatgctggttgcaatgtggttttggctattgctgctgcagccttatgtgcttatgttgctcctgcggcagcaggatctggtataccagaggttaaagcatacctcaatggtgtagatgctccttctattttggcacctgctaccctttttgtaaagatatttgggtccatatttggggttgctgctggatttgttgttggcaaagaaggacccatggtgcatactggtgcttgcatagcctcctttcttggacagggaggttctcgtaagtatcatttgacatggaaatggctgagatacttcaaaaatgatcgagaccggcgagatttgatcacatgtggttctgctgctggtgtagcagctgccttccgtgctcctgttggcggggtcttatttgcccttgaagaagctgcttcctggtggaggagtgcccttctttggaggacattcttcacaacagctgtagtagcagttgtattgagaagtctcatagaattttgccgaactggaaaatgtgggctgtttggacaaggaggtctgatcatgtttgatgtaaattcgacaaaagctacttatagtaccccagatctagtagcagttatgttccttggagtgataggaggtgtttttggaagcttttacaactattgtgttgacaaggtccttcgcacttacagcatcatcaatgagagaggtccttcgtttaagatcctgcttgttattgtcatttccctgctgacctcttgttgctcctacggcctcccatggctttcacagtgcattccctgtccccctcacctggctgagcaatgccccactgaaagtcgctctggaaacttcaagaatttccagtgtccaccaaaccactataacaatcttgcttccctctttttcaacaccaatgatgatgccatccgcatcttattcacttctggcagcgaaaaagaatttgacctctccacccttctggttttcttcgttgctattttctgccttggcattgttacttatggcattgctgttccctctgggctcttcatcccagtcattcttgctggggcctcttatggccgtcttgttggaacactgctcggtcccctttctaatcttgatgtgggtctctttgcccttcttggagctgcctccttccttggtggcaccatgagaatgacagtttctctttgtgtcatacttctcgaactgactaatgatctgcttatgcttccattaatgatgctagtgctcctcatttcaaaatctgtggctgatattttcaataagggtgtttatgatcaaattatgaaaattaaaggattgccttatatggaaacccatgcagaaccatacatgagacaccttattgcaagtgatgttgtttctggtccattagtttcattctctggggttgaaaaggtagggaacatattacatgtcctgagagtaacaaggcataatggatttcctgtgattgacgagccgccttattcagatgctccagaattatgtgggcttgtcttgaggtctcatctgctcgtgttgcttaaaggaaagaaatttacaaagcagagagtaaagacaggatcagatattgtgaggggtttcaaggcacatgactttgcaaaggctggatcgggcaaaggggtgaagctggaagatttggagatcacagaggaggagatggagatgtatattgatctccatcctattgctaacacatctccatacaccgtggttgaatccatgtctctagctaaagctgctgttctctttcgcgaacttggccttagacacttgtgtgtggtgtcgaagacgccagggatgcctcctattgttggaatcttgactcggcacgacttcaccccggagcatgtactggggctttacccacatattaaaccccacaagtag

SEQ ID NO: 68 - protein, 743 aa, Populus trichocarpa
MLREPFLVRNRKNNTSQIAIVGANTCPIESLDYEIAENELLKQDWRSRKKAEIFQYVVLKWTLALLIGLGTGLVGFFNNLAIENIAGFKLLVTNNLMLKEMYYQAFATYAGCNVVLAIAAAALCAYVAPAAAGSGIPEVKAYLNGVDAPSILAPATLFVKIFGSIFGVAAGFVVGKEGPMVHTGACIASFLGQGGSRKYHLTWKWLRYFKNDRDRRDLITCGSAAGVAAAFRAPVGGVLFALEEAASWWRSALLWRTFFTTAVVAVVLRSLIEFCRTGKCGLFGQGGLIMFDVNSTKATYSTPDLVAVMFLGVIGGVFGSFYNYCVDKVLRTYSIINERGPSFKILLVIVISLLTSCCSYGLPWLSQCIPCPPHLAEQCPTESRSGNFKNFQCPPNHYNNLASLFFNTNDDAIRILFTSGSEKEFDLSTLLVFFVAIFCLGIVTYGIAVPSGLFIPVILAGASYGRLVGTLLGPLSNLDVGLFALLGAASFLGGTMRMTVSLCVILLELTNDLLMLPLMMLVLLISKSVADIFNKGVYDQIMKIKGLPYMETHAEPYMRHLIASDVVSGPLVSFSGVEKVGNILHVLRVTRHNGFPVIDEPPYSDAPELCGLVLRSHLLVLLKGKKFTKQRVKTGSDIVRGFKAHDFAKAGSGKGVKLEDLEITEEEMEMYIDLHPIANTSPYTVVESMSLAKAAVLFRELGLRHLCVVSKTPGMPPIVGILTRHDFTPEHVLGLYPHIKPHK

SEQ ID NO: 69 - DNA, 2232 bp, Populus trichocarpa
atgttgagagagccgtttcttgttaggaatataaagaataatacttcacagattgccattgttggtgccaatacctgccctattgaaagccttgattatgagattgctgataatgaactttttagacaagactggaggtctcgaaagaaggttgagatatatcagtatgttgtcctcaagtggacacttgctctcctcattgggttaggtacagggcttgtcggctttttcaataaccttgctgttgaaaacatagctggtttcaaacttctgttgacaaacaatctcatgcttgagaacaagtactatcaggcatttgcaacttatgctggttgcaacgtggttttggctattgctgctgcagccctctgtgcttacgttgctcctgcagcagcaggctctggtatacctgaggttaaagcatacctcaatggtgtagatgctccttctattttggctcctgctaccctctttgtaaagattttcgggtccatatttggagttgctgctggatttgttgttggtaaagaaggacccatggtacatactggtgcttgcatagcctccttacttggacagggtggttctcgcaagtatcatttgacatggaaatggttgagatacttcaaaaatgatcgagaccggcgagatttggttacatgtggttctgctgctggtgtagcagctgccttccgtgctcctgttggcggggtcttatttgcccttgaagaagctgcttcctggtggaggagtgcccttctttggaggacgttctttacgacagctgtagttgcagtcgtattgagaggtctcatagatttttgccgatctggaaaatgtgggctatttggacaaggaggtctgatcatgtttgacgtaaattctagaaaagccttttacagcaccccagatctactagcagttgtgttccttggagtgataggaggcgttttcggaagcctttacaactattgtgtcgacaaggttcttcgcacgtacagcctcatcaatgagaggggtccttcgtttaagatcctgcttgttattgtcatttcccttttgacctcttgttgctcctatggtctcccatggctttcgaagtgcattccctgtccccctcacctggccgagaaatgcccaactgaaggtcgctctggcaacttcaagaatttccagtgtccaccaaaccactacaacgaccttgcttccctcgttttcaacaccaatgatgatgccatccgcaacctattcacttccggtagtgaaaaggaatttcacctctccacccttatagttttcttctttgctatttattgccttggcattgttacttacggcattgctgttccctctgggctcttcatccccgtcattcttgctggggcctcttatgggcgtcttattggaacaatgcttggccctctgtctaatctcgatgcgggtctctgtgccctccttggagctgcctccttccttggtggcaccatgagaatgacagtttctctctgtgtcatacttcttgaacttactaatgatctgcttatgcttccactaataatgctagtgctcctcatttcaaaaacagtggccgatagtttcaacaagggtatttatgatcaaatggtgagaatgaaaggatttccgtacatggaagcccatgcagaaccatacatgagacatcttgttgcaagtgatgttgtttctggtccattagtttcattctctgggattgaaaaagtagggaacctgttgcttgctttgaaagtaacagggcataatggattccctgtgattgatgagccgccttgttcagatgctccagaattgtgtgggcttgtcttgaggtctcatctgcttgtgttgctaagaggaaagaaatttacaaaacagagagtaaagacgggatcagggatcatgaagagtttcaaggcacatgactttgcaaaggctggatcaggcaaaggggtgaagctggaggatttggagatcacagaggaggagatggagatgtatgttgatctccatcctattactaacacatctccatacaccgtggttgaaacaatgtctctagctaaagctgctgttctctttcgcgaacttggccttagacacttgtgtgtggtgccgaagacaccagggaggcctcctattgtcggaatcctgactcggcatgacttcacaccagatcatatactggggctttacccacatattaaacctcacaagtag

SEQ ID NO: 70 - protein, 743 aa, Populus trichocarpa
MLREPFLVRNIKNNTSQIAIVGANTCPIESLDYEIADNELFRQDWRSRKKVEIYQYVVLKWTLALLIGLGTGLVGFFNNLAVENIAGFKLLLTNNLMLENKYYQAFATYAGCNVVLAIAAAALCAYVAPAAAGSGIPEVKAYLNGVDAPSILAPATLFVKIFGSIFGVAAGFVVGKEGPMVHTGACIASLLGQGGSRKYHLTWKWLRYFKNDRDRRDLVTCGSAAGVAAAFRAPVGGVLFALEEAASWWRSALLWRTFFTTAVVAVVLRGLIDFCRSGKCGLFGQGGLIMFDVNSRKAFYSTPDLLAVVFLGVIGGVFGSLYNYCVDKVLRTYSLINERGPSFKILLVIVISLLTSCCSYGLPWLSKCIPCPPHLAEKCPTEGRSGNFKNFQCPPNHYNDLASLVFNTNDDAIRNLFTSGSEKEFHLSTLIVFFFAIYCLGIVTYGIAVPSGLFIPVILAGASYGRLIGTMLGPLSNLDAGLCALLGAASFLGGTMRMTVSLCVILLELTNDLLMLPLIMLVLLISKTVADSFNKGIYDQMVRMKGFPYMEAHAEPYMRHLVASDVVSGPLVSFSGIEKVGNLLLALKVTGHNGFPVIDEPPCSDAPELCGLVLRSHLLVLLRGKKFTKQRVKTGSGIMKSFKAHDFAKAGSGKGVKLEDLEITEEEMEMYVDLHPITNTSPYTVVETMSLAKAAVLFRELGLRHLCVVPKTPGRPPIVGILTRHDFTPDHILGLYPHIKPHK

SEQ ID NO: 71 - DNA, 2358 bp, Populus trichocarpa
atggaggcagattcaagccaattggcagaagcaacagcaggtcataacttggaagttggtgaagaaggaagagacccagaaagcaatacacttcaccagccactcctcaagagaaataggacactatcttctaatccactagccttggttggagccaaggtctcacatatagagagtttggattacgagatcaatgagaatgatcttttcaagcacgattggagaagcagatccaaagttcaagtcttgcagtatatattctggaaatggacattggcctttcttgttggacttttaactggattaattgcaaccttcatcaatcttgcagttgagaacattgctggttacaagattcttgctgtggttcactttatagagaataaaaggtatttgacagggctagtctacttcacaggggctaatcttctcttaaccttatttgcttccgtcctgtgcgtgtgttttgcaccaactgcagcagggcctggtatacctgaaatcaaagcttatctcaatggagttgatactcctaacatgtttggggttacaacattgatcgttaagatatttggaagcataggagctgtctctgctggacttgatttagggaaagaagggcctctggtgcacattggcagctgcattgcttccttgttaggccaagggggacctgataattaccgactcaagtggcgctggcttcgttatttcaacaatgacagagaccgccgagatatcatcacctgcggtgcttcctcgggtgtttgtgcagctttccgttccccagtgggtggtgtcctctttgctcttgaagaggtagcaacatggtggaggagtgcactcctctggagaactttcttcagcacagcagtagttgtggtaatcctcaggactttcattgaaatatgcaattcagggaagtgtggactgtttggaaaaggagggctgataatgttcgatgtgagcgatgttgtggtgacataccatgtgatggatgtcatccctatcaccataattggcatacttggaggaattctgggaagcctctacaattaccttctccacaaggtccttgtagtctacaatctcatcaaccagaagggaagaatacataagctccttctcgccctaactgtttcaatctttacctcagtgtgtctatatggcttacctttccttgccaagtgccaaccttgtgatccctctgtacaagagatctgccctactaattcccggtcaggcaacttcaagcaattcaactgtccagatggccactataatgaccttgctactctccttttcacaacaaatgatgatgccgttcgaaacatcttctcttccaatgctcttaaggagtttcagcctgcatccctcctaattttctttgtactctattgcatcctaggactatttaccttcggcattgctgtgccttcaggacttttcctccccatcatccttatgggctcagcttatggccgtctgcttggtattgccatggggtcctataccaaaattgatcaagggctttatgctgttcttggtgcagcctccctcatggctggatcgatgaggatgactgtttcactctgtgtgattttccttgaactcaccaacaacctcctattacttcccataacaatgatagttctccttatatccaaaactgttggagacagctttaatccaagcatctatgaaattattctggatctaaaaggcctgcctttcttggacgcgaaccctgagccatggatgagaaatctcactgttgctgagcttgctgatgccaaaccaccagtagtcactctttgtggagttgaaaaggtatcccggattgttgaagtcctcgaaaacaccacgcataatggattcccagttgtagacgaaggagtggtgccacttatggggctggccactggggcaacagaactacatggcctgatcctgagagctcacctagttcaagtgctgaagaaaaagtggttcttgccagagaaaagaagaacagaggaatgggaagtaagagagaaatttgactgggttgagctagctgagagggatggaacaattgaagaggtggctgtgacaaggaatgagatggaaatgtatgttgacttgcatcctctcaccaacacaaccccttacacagtcgtggagagcatgtcagtagcaaaagccatggtgctcttcaggcaggtgggacttcgccatatgctcattctacccaagtatcaagcagctggggtccctccagtggttgggatactgaccaggcaggatttaagagcacataacatcttgcttgcctttcctcatttgcaaggatccaaaagcagagaaaagaagcactag

SEQ ID NO: 72 - protein, 785 aa, Populus trichocarpa
MEADSSQLAEATAGHNLEVGEEGRDPESNTLHQPLLKRNRTLSSNPLALVGAKVSHIESLDYEINENDLFKHDWRSRSKVQVLQYIFWKWTLAFLVGLLTGLIATFINLAVENIAGYKILAVVHFIENKRYLTGLVYFTGANLLLTLFASVLCVCFAPTAAGPGIPEIKAYLNGVDTPNMFGVTTLIVKIFGSIGAVSAGLDLGKEGPLVHIGSCIASLLGQGGPDNYRLKWRWLRYFNNDRDRRDIITCGASSGVCAAFRSPVGGVLFALEEVATWWRSALLWRTFFSTAVVVVILRTFIEICNSGKCGLFGKGGLIMFDVSDVVVTYHVMDVIPITIIGILGGILGSLYNYLLHKVLVVYNLINQKGRIHKLLLALTVSIFTSVCLYGLPFLAKCQPCDPSVQEICPTNSRSGNFKQFNCPDGHYNDLATLLFTTNDDAVRNIFSSNALKEFQPASLLIFFVLYCILGLFTFGIAVPSGLFLPIILMGSAYGRLLGIAMGSYTKIDQGLYAVLGAASLMAGSMRMTVSLCVIFLELTNNLLLLPITMIVLLISKTVGDSFNPSIYEIILDLKGLPFLDANPEPWMRNLTVAELADAKPPVVTLCGVEKVSRIVEVLENTTHNGFPVVDEGVVPLMGLATGATELHGLILRAHLVQVLKKKWFLPEKRRTEEWEVREKFDWVELAERDGTIEEVAVTRNEMEMYVDLHPLTNTTPYTVVESMSVAKAMVLFRQVGLRHMLILPKYQAAGVPPVVGILTRQDLRAHNILLAFPHLQGSKSREKKH

SEQ ID NO: 73 - DNA, 2328 bp, Populus trichocarpa
atgtcaacaaattctatcaatagggaagcaaacacagaccaagagtctcttataattcctctcctgtcccctcgaagatcactcattaactccacttctcaagttgccatcgttggagctaatgtctgccccattgaaagtcttgattatgagattgctgagaatgagttctttaaacaagattggaggagtcgtggaaagatgcaaatatttcagtatgtgttcatgaagtggtcgctttgtttcttgatcggacttattgttagccttattgggttttttaacaatcttgctgttgaaaatattgctggcttgaagtttgtggtcacctccaatatgatgctggccaaaaggtttgggatggcttttcttgtgttctcagtttctaatttgattcttaccctgtttgcatccatcatcacggcttttatagcaccagctgctgctggttcaggtattccagaagttaaggcttacctgaatggtgtggatgcacctggaattttttccttgcgaagtttggttattaagattattggaagcatttctgcggtgtcctcgtctctttttgttggaaaggcagggccaatggtgcacactggagcatgtgttgcagcattgcttggtcagggtggatccaagagatttaaattaacatggagatggcttcgttttttcaaaaatgaccgagacagacgggatcttgtaacatgtggatcagctgctggaatagctgctgccttccgtgccccagttggaggtgtgctgtttgcacttgaagaaatggcatcttggtggagaagtgcccttctttggagagctttcttcacaacagcagtagttgcaatagtgcttcgggctctgattgacgtctgtttaagtggaaaatgtgggctatttggaaaaggagggctcataatgtttgatgtgtattcagcaagtgttacgtaccacctcattgatgtaccacctgtgttcgcccttggagttataggaggcatattgggaagtttgtataacttccttctagacaaggttcttcgaatatacaatctcatcaatgagaaaggcgttgtttacaaaattttacttgcttgtgcaatttccattttcacatcctgtcttctttttggactaccatggcttgcctcttgccaaccctgtccatctgatgcgtcggaagcttgtccaacaataggccggtctggtaatttcaagaaatttcaatgtcctcctggacagtacaatgatctggccagccttatatttaacacaaatgatgattctgttaaaaatcttttcagccaggacaccaactctgagtttcaatattcgtcaattctcatattctttgtgacctgcttctttcttagtatctttagctatgggattgttgcccccgcgggtttattcataccagttatcgtgacgggtgcatcttatggacgttttgttggaatgctagttggttcacactcaaatcttgatcacggcctctatgctgtcttaggtgctgcttcatttctaggcggatctatgaggatgacagtttctctgtgtgtcattattctagaattgacaaataatctgttgatgctacccttgataatgcttgttcttcttatttccaagactgtggctgatgctttcaatggtaatatttatgaccttatcatgaatgcgaagggttttccttacctagaagctcacaccgagccttatatgaggcagttgacagttggtgaagtagttaggggtccacttcagatctttcagggcattgaaaaggttggcaaaatagtacatgttctaagaactacgaggcataatggatttcccgtaattgatgagcctccgctttctgagtctccagttctttatggtctaatcctccgtgctcatctaattgaattgctaaagaagaaagcttttgtgccaactccagtaccaacaggcactgatgccttcaagctgttctttgctggtgattttgcaaagaggggctcaggcaatggagacaagatagaggatctgcaatttaccgaagaagagatggagatgtttttagatttacatccatttacgaatgcttcaccttatactgttgcggagacaatgtcactggctaaggctctcatacttttccgagaagttggtttgaggcatttactggtgatacccaagatatctggtaggtcccctgttgtgggtatattgactaggcacgatttcatgccagggcatatacttggtctgcatcctatgctgattagaagcaggtggaaaagattaagaatccaggcacctcgtttattcaaactcttctag

SEQ ID NO: 74 - protein, 775 aa, Populus trichocarpa
MSTNSINREANTDQESLIIPLLSPRRSLINSTSQVAIVGANVCPIESLDYEIAENEFFKQDWRSRGKMQIFQYVFMKWSLCFLIGLIVSLIGFFNNLAVENIAGLKFVVTSNMMLAKRFGMAFLVFSVSNLILTLFASIITAFIAPAAAGSGIPEVKAYLNGVDAPGIFSLRSLVIKIIGSISAVSSSLFVGKAGPMVHTGACVAALLGQGGSKRFKLTWRWLRFFKNDRDRRDLVTCGSAAGIAAAFRAPVGGVLFALEEMASWWRSALLWRAFFTTAVVAIVLRALIDVCLSGKCGLFGKGGLIMFDVYSASVTYHLIDVPPVFALGVIGGILGSLYNFLLDKVLRIYNLINEKGVVYKILLACAISIFTSCLLFGLPWLASCQPCPSDASEACPTIGRSGNFKKFQCPPGQYNDLASLIFNTNDDSVKNLFSQDTNSEFQYSSILIFFVTCFFLSIFSYGIVAPAGLFIPVIVTGASYGRFVGMLVGSHSNLDHGLYAVLGAASFLGGSMRMTVSLCVIILELTNNLLMLPLIMLVLLISKTVADAFNGNIYDLIMNAKGFPYLEAHTEPYMRQLTVGEVVRGPLQIFQGIEKVGKIVHVLRTTRHNGFPVIDEPPLSESPVLYGLILRAHLIELLKKKAFVPTPVPTGTDAFKLFFAGDFAKRGSGNGDKIEDLQFTEEEMEMFLDLHPFTNASPYTVAETMSLAKALILFREVGLRHLLVIPKISGRSPVVGILTRHDFMPGHILGLHPMLIRSRWKRLRIQAPRLFKLF

SEQ ID NO: 75 - DNA, 2310 bp, Populus trichocarpa
atggaggaggatcatagtagtagagaagggaatggatttgagatagaagatgatgatgataaggaacacagtgtgtcaatgttgagagagccgtttcttgttaggaatataaagaataatacttcacagattgccattgttggtgccaatacctgccctattgaaagccttgattatgagattgctgataatgaactttttagacaagactggaggtctcgaaagaaggttgagatatatcagtatgttgtcctcaagtggacacttgctctcctcattgggttaggtacagggcttgtcggctttttcaataaccttgctgttgaaaacatagctggtttcaaacttctgttgacaaacaatctcatgcttgagaacaagtactatcaggcatttgcaacttatgctggttgcaacgtggttttggctattgctgctgcagccctctgtgcttacgttgctcctgcagcagcaggctctggtatacctgaggttaaagcatacctcaatggtgtagatgctccttctattttggctcctgctaccctctttgtaaagattttcgggtccatatttggagttgctgctggatttgttgttggtaaagaaggacccatggtacatactggtgcttgcatagcctccttacttggacagggtggttctcgcaagtatcatttgacatggaaatggttgagatacttcaaaaatgatcgagaccggcgagatttggttacatgtggttctgctgctggtgtagcagctgccttccgtgctcctgttggcggggtcttatttgcccttgaagaagctgcttcctggtggaggagtgcccttctttggaggacgttctttacgacagctgtagttgcagtcgtattgagaggtctcatagatttttgccgatctggaaaatgtgggctatttggacaaggaggtctgatcatgtttgacgtaaattctagaaaagccttttacagcaccccagatctactagcagttgtgttccttggagtgataggaggcgttttcggaagcctttacaactattgtgtcgacaaggttcttcgcacgtacagcctcatcaatgagaggggtccttcgtttaagatcctgcttgttattgtcatttcccttttgacctcttgttgctcctatggtctcccatggctttcgaagtgcattccctgtccccctcacctggccgagaaatgcccaactgaaggtcgctctggcaacttcaagaatttccagtgtccaccaaaccactacaacgaccttgcttccctcgttttcaacaccaatgatgatgccatccgcaacctattcacttccggtagtgaaaaggaatttcacctctccacccttatagttttcttctttgctatttattgccttggcattgttacttacggcattgctgttccctctgggctcttcatccccgtcattcttgctggggcctcttatgggcgtcttattggaacaatgcttggccctctgtctaatctcgatgcgggtctctgtgccctccttggagctgcctccttccttggtggcaccatgagaatgacagtttctctctgtgtcatacttcttgaacttactaatgatctgcttatgcttccactaataatgctagtgctcctcatttcaaaaacagtggccgatagtttcaacaagggtatttatgatcaaatggtgagaatgaaaggatttccgtacatggaagcccatgcagaaccatacatgagacatcttgttgcaagtgatgttgtttctggtccattagtttcattctctgggattgaaaaagtagggaacctgttgcttgctttgaaagtaacagggcataatggattccctgtgattgatgagccgccttgttcagatgctccagaattgtgtgggcttgtcttgaggtctcatctgcttgtgttgctaagaggaaagaaatttacaaaacagagagtaaagacgggatcagggatcatgaagagtttcaaggcacatgactttgcaaaggctggatcaggcaaaggggtgaagctggaggatttggagatcacagaggaggagatggagatgtatgttgatctccatcctattactaacacatctccatacaccgtggttgaaacaatgtctctagctaaagctgctgttctctttcgcgaacttggccttagacacttgtgtgtggtgccgaagacaccagggaggcctcctattgtcggaatcctgactcggcatgacttcacaccagatcatatactggggctttacccacatattaaacctcacaagtag

SEQ ID NO: 76 - protein, 769 aa, Populus trichocarpa
MEEDHSSREGNGFEIEDDDDKEHSVSMLREPFLVRNIKNNTSQIAIVGANTCPIESLDYEIADNELFRQDWRSRKKVEIYQYVVLKWTLALLIGLGTGLVGFFNNLAVENIAGFKLLLTNNLMLENKYYQAFATYAGCNVVLAIAAAALCAYVAPAAAGSGIPEVKAYLNGVDAPSILAPATLFVKIFGSIFGVAAGFVVGKEGPMVHTGACIASLLGQGGSRKYHLTWKWLRYFKNDRDRRDLVTCGSAAGVAAAFRAPVGGVLFALEEAASWWRSALLWRTFFTTAVVAVVLRGLIDFCRSGKCGLFGQGGLIMFDVNSRKAFYSTPDLLAVVFLGVIGGVFGSLYNYCVDKVLRTYSLINERGPSFKILLVIVISLLTSCCSYGLPWLSKCIPCPPHLAEKCPTEGRSGNFKNFQCPPNHYNDLASLVFNTNDDAIRNLFTSGSEKEFHLSTLIVFFFAIYCLGIVTYGIAVPSGLFIPVILAGASYGRLIGTMLGPLSNLDAGLCALLGAASFLGGTMRMTVSLCVILLELTNDLLMLPLIMLVLLISKTVADSFNKGIYDQMVRMKGFPYMEAHAEPYMRHLVASDVVSGPLVSFSGIEKVGNLLLALKVTGHNGFPVIDEPPCSDAPELCGLVLRSHLLVLLRGKKFTKQRVKTGSGIMKSFKAHDFAKAGSGKGVKLEDLEITEEEMEMYVDLHPITNTSPYTVVETMSLAKAAVLFRELGLRHLCVVPKTPGRPPIVGILTRHDFTPDHILGLYPHIKPHK

SEQ ID NO: 77 - DNA, 2298 bp, Populus trichocarpa
atgtcaacaaattctatcaatagggaagcaaacacagaccaagagtctcttataattcctctcctgtcccctcgaagatcactcattaactccacttctcaagttgccatcgttggagctaatgtctgccccattgaaagtcttgattatgagattgctgagaatgagttctttaaacaagattggaggagtcgtggaaagatgcaaatatttcagtatgtgttcatgaagtggtcgctttgtttcttgatcggacttattgttagccttattgggttttttaacaatcttgctgttgaaaatattgctggcttgaagtttgtggtcacctccaatatgatgctggccaaaaggtttgggatggcttttcttgtgttctcagtttctaatttgattcttaccctgtttgcatccatcatcacggcttttatagcaccagctgctgctggttcaggtattccagaagttaaggcttacctgaatggtgtggatgcacctggaattttttccttgcgaagtttggttattaagattattggaagcatttctgcggtgtcctcgtctctttttgttggaaaggcagggccaatggtgcacactggagcatgtgttgcagcattgcttggtcagggtggatccaagagatttaaattaacatggagatggcttcgttttttcaaaaatgaccgagacagacgggatcttgtaacatgtggatcagctgctggaatagctgctgccttccgtgccccagttggaggtgtgctgtttgcacttgaagaaatggcatcttggtggagaagtgcccttctttggagagctttcttcacaacagcagtagttgcaatagtgcttcgggctctgattgacgtctgtttaagtggaaaatgtgggctatttggaaaaggagggctcataatgtttgatgtgtattcagcaagtgttacgtaccacctcattgatgtaccacctgtgttcgcccttggagttataggaggcatattgggaagtttgtataacttccttctagacaaggttcttcgaatatacaatctcatcaatgagaaaggcgttgtttacaaaattttacttgcttgtgcaatttccattttcacatcctgtcttctttttggactaccatggcttgcctcttgccaaccctgtccatctgatgcgtcggaagcttgtccaacaataggccggtctggtaatttcaagaaatttcaatgtcctcctggacagtacaatgatctggccagccttatatttaacacaaatgatgattctgttaaaaatcttttcagccaggacaccaactctgagtttcaatattcgtcaattctcatattctttgtgacctgcttctttcttagtatctttagctatgggattgttgcccccgcgggtttattcataccagttatcgtgacgggtgcatcttatggacgttttgttggaatgctagttggttcacactcaaatcttgatcacggcctctatgctgtcttaggtgctgcttcatttctaggcggatctatgaggatgacagtttctctgtgtgtcattattctagaattgacaaataatctgttgatgctacccttgataatgcttgttcttcttatttccaagactgtggctgatgctttcaatggtaatatttatgaccttatcatgaatgcgaagggttttccttacctagaagctcacaccgagccttatatgaggcagttgacagttggtgaagtagttaggggtccacttcagatctttcagggcattgaaaaggttggcaaaatagtacatgttctaagaactacgaggcataatggatttcccgtaattgatgagcctccgctttctgagtctccagttctttatggtctaatcctccgtgctcatctaattgaattgctaaagaagaaagcttttgtgccaactccagtaccaacaggcactgatgccttcaagctgttctttgctggtgattttgcaaagaggggctcaggcaatggagacaagatagaggatctgcaatttaccgaagaagagatggagatgtttttagatttacatccatttacgaatgcttcaccttatactgttgcggagacaatgtcactggctaaggctctcatacttttccgagaagttggtttgaggcatttactggtgatacccaagatatctggtgtaaggaattctatcctcgctttttgttttttaaaatgtctacttgtagcttacacaaatttaaggcactttacaagttgttgctctgcacttgatattaattaa

SEQ ID NO: 78 - protein, 765 aa, Populus trichocarpa
MSTNSINREANTDQESLIIPLLSPRRSLINSTSQVAIVGANVCPIESLDYEIAENEFFKQDWRSRGKMQIFQYVFMKWSLCFLIGLIVSLIGFFNNLAVENIAGLKFVVTSNMMLAKRFGMAFLVFSVSNLILTLFASIITAFIAPAAAGSGIPEVKAYLNGVDAPGIFSLRSLVIKIIGSISAVSSSLFVGKAGPMVHTGACVAALLGQGGSKRFKLTWRWLRFFKNDRDRRDLVTCGSAAGIAAAFRAPVGGVLFALEEMASWWRSALLWRAFFTTAVVAIVLRALIDVCLSGKCGLFGKGGLIMFDVYSASVTYHLIDVPPVFALGVIGGILGSLYNFLLDKVLRIYNLINEKGVVYKILLACAISIFTSCLLFGLPWLASCQPCPSDASEACPTIGRSGNFKKFQCPPGQYNDLASLIFNTNDDSVKNLFSQDTNSEFQYSSILIFFVTCFFLSIFSYGIVAPAGLFIPVIVTGASYGRFVGMLVGSHSNLDHGLYAVLGAASFLGGSMRMTVSLCVIILELTNNLLMLPLIMLVLLISKTVADAFNGNIYDLIMNAKGFPYLEAHTEPYMRQLTVGEVVRGPLQIFQGIEKVGKIVHVLRTTRHNGFPVIDEPPLSESPVLYGLILRAHLIELLKKKAFVPTPVPTGTDAFKLFFAGDFAKRGSGNGDKIEDLQFTEEEMEMFLDLHPFTNASPYTVAETMSLAKALILFREVGLRHLLVIPKISGVRNSILAFCFLKCLLVAYTNLRHFTSCCSALDIN

SEQ ID NO: 79 - DNA, 2277 bp, Populus trichocarpa
atggaggattatagtaatagagaaaagaatgatttagagatagatgatgataaggaacacagtgtgtcaatgttgagagagccatttcttgttaggaatagaaagaacaatacttcacagattgccattgttggtgctaatacctgccccatcgaaagccttgattatgagattgctgagaatgaacttttgaaacaggactggagatctcgaaagaaggctgagatatttcagtatgttgtcctcaagtggacacttgctctcctcattgggttaggtacagggcttgtcggctttttcaataaccttgccattgagaatatagctggtttcaaacttctgtacaggtactatcaggcatttgcaacttatgctggttgcaatgtggttttggctattgctgctgcagccttatgtgcttatgttgctcctgcggcagcaggatctggtataccagaggttaaagcatacctcaatggtgtagatgctccttctattttggcacctgctaccctttttgtaaagatatttgggtccatatttggggttgctgctggatttgttgttggcaaagaaggacccatggtgcatactggtgcttgcatagcctcctttcttggacagggaggttctcgtaagtatcatttgacatggaaatggctgagatacttcaaaaatgatcgagaccggcgagatttgatcacatgtggttctgctgctggtgtagcagctgccttccgtgctcctgttggcggggtcttatttgcccttgaagaagctgcttcctggtggaggagtgcccttctttggaggacattcttcacaacagctgtagtagcagttgtattgagaagtctcatagaattttgccgaactggaaaatgtgggctgtttggacaaggaggtctgatcatgtttgatgtaaattcgacaaaagctacttatagtaccccagatctagtagcagttatgttccttggagtgataggaggtgtttttggaagcttttacaactattgtgttgacaaggtccttcgcacttacagcatcatcaatgagagaggtccttcgtttaagatcctgcttgttattgtcatttccctgctgacctcttgttgctcctacggcctcccatggctttcacagtgcattccctgtccccctcacctggctgagcaatgccccactgaaagtcgctctggaaacttcaagaatttccagtgtccaccaaaccactataacaatcttgcttccctctttttcaacaccaatgatgatgccatccgcatcttattcacttctggcagcgaaaaagaatttgacctctccacccttctggttttcttcgttgctattttctgccttggcattgttacttatggcattgctgttccctctgggctcttcatcccagtcattcttgctggggcctcttatggccgtcttgttggaacactgctcggtcccctttctaatcttgatgtgggtctctttgcccttcttggagctgcctccttccttggtggcaccatgagaatgacagtttctctttgtgtcatacttctcgaactgactaatgatctgcttatgcttccattaatgatgctagtgctcctcatttcaaaatctgtggctgatattttcaataagggtgtttatgatcaaattatgaaaattaaaggattgccttatatggaaacccatgcagaaccatacatgagacaccttattgcaagtgatgttgtttctggtccattagtttcattctctggggttgaaaaggtagggaacatattacatgtcctgagagtaacaaggcataatggatttcctgtgattgacgagccgccttattcagatgctccagaattatgtgggcttgtcttgaggtctcatctgctcgtgttgcttaaaggaaagaaatttacaaagcagagagtaaagacaggatcagatattgtgaggggtttcaaggcacatgactttgcaaaggctggatcgggcaaaggggtgaagctggaagatttggagatcacagaggaggagatggagatgtatattgatctccatcctattgctaacacatctccatacaccgtggttgaatccatgtctctagctaaagctgctgttctctttcgcgaacttggccttagacacttgtgtgtggtgtcgaagacgccagggatgcctcctattgttggaatcttgactcggcacgacttcaccccggagcatgtactggggctttacccacatattaaaccccacaagtag

SEQ ID NO: 80 - protein, 758 aa, Populus trichocarpa
MEDYSNREKNDLEIDDDKEHSVSMLREPFLVRNRKNNTSQIAIVGANTCPIESLDYEIAENELLKQDWRSRKKAEIFQYVVLKWTLALLIGLGTGLVGFFNNLAIENIAGFKLLYRYYQAFATYAGCNVVLAIAAAALCAYVAPAAAGSGIPEVKAYLNGVDAPSILAPATLFVKIFGSIFGVAAGFVVGKEGPMVHTGACIASFLGQGGSRKYHLTWKWLRYFKNDRDRRDLITCGSAAGVAAAFRAPVGGVLFALEEAASWWRSALLWRTFFTTAVVAVVLRSLIEFCRTGKCGLFGQGGLIMFDVNSTKATYSTPDLVAVMFLGVIGGVFGSFYNYCVDKVLRTYSIINERGPSFKILLVIVISLLTSCCSYGLPWLSQCIPCPPHLAEQCPTESRSGNFKNFQCPPNHYNNLASLFFNTNDDAIRILFTSGSEKEFDLSTLLVFFVAIFCLGIVTYGIAVPSGLFIPVILAGASYGRLVGTLLGPLSNLDVGLFALLGAASFLGGTMRMTVSLCVILLELTNDLLMLPLMMLVLLISKSVADIFNKGVYDQIMKIKGLPYMETHAEPYMRHLIASDVVSGPLVSFSGVEKVGNILHVLRVTRHNGFPVIDEPPYSDAPELCGLVLRSHLLVLLKGKKFTKQRVKTGSDIVRGFKAHDFAKAGSGKGVKLEDLEITEEEMEMYIDLHPIANTSPYTVVESMSLAKAAVLFRELGLRHLCVVSKTPGMPPIVGILTRHDFTPEHVLGLYPHIKPHK

SEQ ID NO: 81 - DNA, 2388 bp, Zea mays
atggacgctaaccactcgccgccggcgcagccggagaggaatcatggcagcttaaactacgacatcgagagcacggacggcacgtggcgcggcgcgggggcgtggcaggagcaggacccatcgtcggaggccctgatgcggtacgacgacgacgggccccgggagccgctgctgcgaaggcgcaccatgaacaccacctcccagattgccatcgtcggcgccaacatctgccccatcgagagcctcgactacgaaattgtggaaaatgaccttttcaagcaggattggcgatcaagaaagaagcagcagatattccagtatattgttctgaaatggtcattagttcttcttattggcctgtgtactggacttgttggcttcttcaataaccttgcagttgaaaacattgctgggttcaagttgttgcttacaagtgatctgatgctcaagcaaaggtacttcacagcatttctggcatatggaggttgcaatctagtcttggcagctgctgctgcagcgatctgcgcttacatagcacctgctgctgctgggtctggtatccctgaagttaaagcataccttaatggagttgatgcttatgctatattagctccaagcacactgtttgtgaagatatttggttcaatacttggagtttcagctggatttgtccttggaaaggaaggtcccatggtacatacaggagcatgcattgccaacttacttggtcaaggggggtcacgcaagtaccatctgacatgtaactggctcagatactttaagaatgatagagataggcgggatttgattacttgtggctctgctgctggagttgcagcagcattccgtgcgcctgttggtggtgtgctctttgctcttgaagaagcagcatcatggtggcgaagtgctctcctgtggagaacattctttacaactgctgttgttgctgttgtactgaggggtctgatccagttctgtcgtagcggaaaatgtggtctttttggtcagggagggttgattatgtttgatcttagctcaaccgtaccgagttacagtacccaggatatcattgcaattattgtccttggaataattggtggggtcttcgggggcctgttcaactttctcttggataggattctccgagcttatagttttatcaacgagagaggtgctccatacaagatccttctcaccgtcacaatatcaatcatcacatcagcatgctcctatgggctaccttggctcgccccatgcactccgtgccctgctgatgctgtggaggaatgccctaccattggccgctctgggaattttaagaactttcagtgcccgccgggctattacaatggtcttgcgtcgttgttcttcaacacaaatgatgacgccatccgcaatctattcagcagtggcaccgagaatgagttccacatgtccactcttttcgtgttcttcactgcgatttactgccttggccttgtgacatacggtattgctgttccatctggtctcttcatccctgttatacttgctggggctacgtacgggcgcatagtggggacccttcttggtccaatttcagaccttgatcctggactattcgcacttcttggcgcggcatctttcctcggtggaacaatgaggatgactgtgtcagtctgcgtgatacttctggagctcaccaatgacctccttatgctcccgttagtcatgctcgttcttctgatatcaaagaccatagccgacagctttaacaaaggggtttatgatcagattgtggtgatgaaaggcttgccattcctggaagctcatgccgaaccatacatgacgcacttggttgctagcgatgttgtgtctgggccactgatctccttttcaggcgtcgagagagtggggaatatcgttcaggcgttgaggatcacaggccacaacggatttccagtggtcgatgagccacctctatcagaggctccagaacttgttgggcttgtgctcagatcccatctgctggtcctgctgaaaggtaagggcttcatgaaagagaagatgaaaaccagcggtagcttcgtgctggaaagatttggtgccttcgattttgccaagccaggctcagggaaaggcctgaagattgaggacctggatttcactgatgaggaaatggacttgtatgtcgatctccatccaattacaaatacatcaccgtacacggtggtagagaccatgtcacttgcgaaggctgccgtccttttccgggcactgggactcaggcacatgctcgttgtgccaaagaccccagggagacctccaattgttggaatcctgacgaggcacgatttcataccggagcatattcatgggctgtttccaaatatacacaagtcacactaa

SEQ ID NO: 82 - protein, 795 aa, Zea mays
MDANHSPPAQPERNHGSLNYDIESTDGTWRGAGAWQEQDPSSEALMRYDDDGPREPLLRRRTMNTTSQIAIVGANICPIESLDYEIVENDLFKQDWRSRKKQQIFQYIVLKWSLVLLIGLCTGLVGFFNNLAVENIAGFKLLLTSDLMLKQRYFTAFLAYGGCNLVLAAAAAAICAYIAPAAAGSGIPEVKAYLNGVDAYAILAPSTLFVKIFGSILGVSAGFVLGKEGPMVHTGACIANLLGQGGSRKYHLTCNWLRYFKNDRDRRDLITCGSAAGVAAAFRAPVGGVLFALEEAASWWRSALLWRTFFTTAVVAVVLRGLIQFCRSGKCGLFGQGGLIMFDLSSTVPSYSTQDIIAIIVLGIIGGVFGGLFNFLLDRILRAYSFINERGAPYKILLTVTISIITSACSYGLPWLAPCTPCPADAVEECPTIGRSGNFKNFQCPPGYYNGLASLFFNTNDDAIRNLFSSGTENEFHMSTLFVFFTAIYCLGLVTYGIAVPSGLFIPVILAGATYGRIVGTLLGPISDLDPGLFALLGAASFLGGTMRMTVSVCVILLELTNDLLMLPLVMLVLLISKTIADSFNKGVYDQIVVMKGLPFLEAHAEPYMTHLVASDVVSGPLISFSGVERVGNIVQALRITGHNGFPVVDEPPLSEAPELVGLVLRSHLLVLLKGKGFMKEKMKTSGSFVLERFGAFDFAKPGSGKGLKIEDLDFTDEEMDLYVDLHPITNTSPYTVVETMSLAKAAVLFRALGLRHMLVVPKTPGRPPIVGILTRHDFIPEHIHGLFPNIHKSH

SEQ ID NO: 83 - protein, 12 aa, Artificial sequence
  motif 1
  VARIANT (1)..(1): / replace = "Cys" / replace = "Ala" / replace = "Gly" / replace = "Pro"
  VARIANT (2)..(2): / replace = "Tyr" / replace = "Pro" / replace = "Gly"
  VARIANT (3)..(3): / replace = "Val" / replace = "Met"
  VARIANT (4)..(4): / replace = "Gln" / replace = "Asn"
  VARIANT (10)..(10): / replace = "Val" / replace = "Leu"
  VARIANT (11)..(11): / replace = "Ala" / replace = "Phe" / replace = "Ile" / replace = "Val"
  VARIANT (12)..(12): / replace = "Glu"
SHIESLDYEINE

SEQ ID NO: 84 - protein, 19 aa, Artificial sequence
  motif 2
  VARIANT (2)..(2): / replace = "Ala" / replace = "Ser"
  VARIANT (4)..(4): / replace = "Gly" / replace = "Thr"
  VARIANT (6)..(6): / replace = "Ser"
  VARIANT (9)..(9): / replace = "Ser"
  VARIANT (11)..(11): / replace = "Ile"
  VARIANT (13)..(13): / replace = "Gly"
  VARIANT (18)..(18): / replace = "Val"
PTAAGPGIPEVKAYLNGID

SEQ ID NO: 85 - protein, 18 aa, Artificial sequence
  motif 3
  VARIANT (2)..(2): / replace = "Cys" / replace = "Asn"
  VARIANT (4)..(4): / replace = "Cys" / replace = "Phe" / replace = "Leu" / replace = "Ala" / replace = "Ser" / replace = "Thr"
  VARIANT (5)..(5): / replace = "Ser" / replace = "Gly"
  VARIANT (7)..(7): / replace = "Ser" / replace = "Gly"
  VARIANT (8)..(8): / replace = "Ser" / replace = "Gly"
  VARIANT (9)..(9): / replace = "Ser"
  VARIANT (10)..(10): / replace = "Phe"
  VARIANT (11)..(11): / replace = "Ala" / replace = "Leu" / replace = "Val" / replace = "Ile" / replace = "His" / replace = "Phe"
  VARIANT (12)..(12): / replace = "Val" / replace = "Ile"
  VARIANT (15)..(15): / replace = "Ala"
  VARIANT (18)..(18): / replace = "Met"
GSIGAVAAGLDLGKEGPL

SEQ ID NO: 86 - protein, 17 aa, Artificial sequence
  motif 4
  VARIANT (11)..(11): / replace = "Ala" / replace = "Ser" / replace = "Gly"
  VARIANT (12)..(12): / replace = "Ala" / replace = "Leu" / replace = "Met"
  VARIANT (13)..(13): / replace = "Thr" / replace = "Ser"
  VARIANT (14)..(14): / replace = "Ser"
  VARIANT (16)..(16): / replace = "Ser"
  VARIANT (17)..(17): / replace = "Alla"
PVGGVLFALEEVATWWR

SEQ ID NO: 87 - protein, 15 aa, Artificial sequence
  motif 5
  VARIANT (1)..(1): / replace = "Asp"
  VARIANT (2)..(2): / replace = "Arg" / replace = "Asn" / replace = "His" / replace = "Ile"
  VARIANT (5)..(5): / replace = "Met" / replace = "His"
  VARIANT (6)..(6): / replace = "Ala"
  VARIANT (8)..(8): / replace = "Lys" / replace = "Glu" / replace = "Gln"
  VARIANT (11)..(11): / replace = "Phe"
  VARIANT (13)..(13): / replace = "Leu" / replace = "Ile"
  VARIANT (14)..(14): / replace = "Tyr" / replace = "Trp"
GKCGLFGSGGLIMFD

SEQ ID NO: 88 - protein, 5 aa, Artificial sequence
  motif 6
  VARIANT (3)..(3): / replace = "Asn" / replace = "Gly" / replace = "Ala"
  VARIANT (4)..(4): / replace = "Met"
  VARIANT (5)..(5): / replace = "Ala"
YNDLS

SEQ ID NO: 89 - protein, 9 aa, Artificial sequence
  motif 7
  VARIANT (2)..(2): / replace = "Thr"
  VARIANT (3)..(3): / replace = "Leu"
  VARIANT (5)..(5): / replace = "Thr"
  VARIANT (9)..(9): / replace = "Val" / replace = "Thr"
GSMRMTVSL

SEQ ID NO: 90 - protein, 15 aa, Artificial sequence
  motif 8
  VARIANT (2)..(2): / replace = "Ile" / replace = "Leu" / replace = "Val" / replace = "Met"
  VARIANT (5)..(5): / replace = "Phe" / replace = "Val"
  VARIANT (6)..(6): / replace = "Val"
  VARIANT (7)..(7): / replace = "Ser"
  VARIANT (9)..(9): / replace = "Ala" / replace = "Ser"
  VARIANT (10)..(10): / replace = "Ile"
  VARIANT (11)..(11): / replace = "Ala"
  VARIANT (12)..(12): / replace = "Asn"
  VARIANT (13)..(13): / replace = "Ala" / replace = "Phe" / replace = "Ile" / replace = "Cys" / replace = "Asn" / replace = "Gly" / replace = "Val"
MFVLLIAKTVGDSFN

SEQ ID NO: 91 - DNA, 2194 bp, Oryza sativa
aatccgaaaagtttctgcaccgttttcaccccctaactaacaatatagggaacgtgtgctaaatataaaatgagaccttatatatgtagcgctgataactagaactatgcaagaaaaactcatccacctactttagtggcaatcgggctaaataaaaaagagtcgctacactagtttcgttttccttagtaattaagtgggaaaatgaaatcattattgcttagaatatacgttcacatctctgtcatgaagttaaattattcgaggtagccataattgtcatcaaactcttcttgaataaaaaaatctttctagctgaactcaatgggtaaagagagagattttttttaaaaaaatagaatgaagatattctgaacgtattggcaaagatttaaacatataattatataattttatagtttgtgcattcgtcatatcgcacatcattaaggacatgtcttactccatcccaatttttatttagtaattaaagacaattgacttatttttattatttatcttttttcgattagatgcaaggtacttacgcacacactttgtgctcatgtgcatgtgtgagtgcacctcctcaatacacgttcaactagcaacacatctctaatatcactcgcctatttaatacatttaggtagcaatatctgaattcaagcactccaccatcaccagaccacttttaataatatctaaaatacaaaaaataattttacagaatagcatgaaaagtatgaaacgaactatttaggtttttcacatacaaaaaaaaaaagaattttgctcgtgcgcgagcgccaatctcccatattgggcacacaggcaacaacagagtggctgcccacagaacaacccacaaaaaacgatgatctaacggaggacagcaagtccgcaacaaccttttaacagcaggctttgcggccaggagagaggaggagaggcaaagaaaaccaagcatcctccttctcccatctataaattcctccccccttttcccctctctatataggaggcatccaagccaagaagagggagagcaccaaggacacgcgactagcagaagccgagcgaccgccttctcgatccatatcttccggtcgagttcttggtcgatctcttccctcctccacctcctcctcacagggtatgtgcctcccttcggttgttcttggatttattgttctaggttgtgtagtacgggcgttgatgttaggaaaggggatctgtatctgtgatgattcctgttcttggatttgggatagaggggttcttgatgttgcatgttatcggttcggtttgattagtagtatggttttcaatcgtctggagagctctatggaaatgaaatggtttagggatcggaatcttgcgattttgtgagtaccttttgtttgaggtaaaatcagagcaccggtgattttgcttggtgtaataaagtacggttgtttggtcctcgattctggtagtgatgcttctcgatttgacgaagctatcctttgtttattccctattgaacaaaaataatccaactttgaagacggtcccgttgatgagattgaatgattgattcttaagcctgtccaaaatttcgcagctggcttgtttagatacagtagtccccatcacgaaattcatggaaacagttataatcctcaggaacaggggattccctgttcttccgatttgctttagtcccagaattttttttcccaaatatcttaaaaagtcactttctggttcagttcaatgaattgattgctacaaataatgcttttatagcgttatcctagctgtagttcagttaataggtaatacccctatagtttagtcaggagaagaacttatccgatttctgatctccatttttaattatatgaaatgaactgtagcataagcagtattcatttggattattttttttattagctctcaccccttcattattctgagctgaaagtctggcatgaactgtcctcaattttgttttcaaattcacatcgattatctatgcattatcctcttgtatctacctgtagaagtttctttttggttattccttgactgcttgattacagaaagaaatttatgaagctgtaatcgggatagttatactgcttgttcttatgattcatttcctttgtgcagttcttggtgtagcttgccactttcaccagcaaagttc

SEQ ID NO: 92 - DNA, 53 bp, Artificial sequence
  primer: prm13490
ggggacaagtttgtacaaaaaagcaggcttaaacaatggaggaggagcagagc

SEQ ID NO: 93 - DNA, 50 bp, Artificial sequence
  primer: prm13491
ggggaccactttgtacaagaaagctgggtctcaaaaatggttcctctcaa

SEQ ID NO: 94 - DNA, 864 bp, Oryza sativa
atggctaggtctctcgctgctctccttctccttctggtcgcagccgcgggagccagccatgccgcgtcgccggcggagatgtactggaagatcgcgctcccgacctcgccgatgcccggcgccattcgcgacctcatcagcccggcgagctcagcggcctcagcttcgaaggataaggaggatacggtgggctccgtgttcttcctcgagaaggacctcttcccgggctccaagatgacgctccacttcacccgcgccaccgccggcgccgcgctgctccctcgcggccgcgccgactccgtcccgttcgcctccgaaaagctcccggagatcctctcccagctctccatccccgccggctcgccgaccgccgacgccatgcggtccacgctcgccgtgtgcgaggccgcgcggatcgccagcgagacggcgcccaagcacaagcactactgcgccacgtcgctcgagtccatggtcgagctcgtcgcctccagcctcggcacccgcgacgtccacgccgtgtccacggaggtggtcaacagggccgggccgacgccgaggcaggcgtacagggtggaggccgtgaggcccgtgccggtgcccgggggcgacatggtggcatgccacaggatgccctacgcgtacgccgtgttcggggtgcacgggatcaagggcgcggcgtacacggtgacgctggccggcgccgacgggaccatggcggaggcggtggcggcgtgccacggggacgtggacgggcacggcgtggcggtggcggaggcgtacaagaggctcggcgtggcgcccgggaaggtggcagtctgccacttcctgcctcaggacgacatgctctgggtgcgcaactga

SEQ ID NO: 95 - protein, 287 aa, Oryza sativa
MARSLAALLLLLVAAAGASHAASPAEMYWKIALPTSPMPGAIRDLISPASSAASASKDKEDTVGSVFFLEKDLFPGSKMTLHFTRATAGAALLPRGRADSVPFASEKLPEILSQLSIPAGSPTADAMRSTLAVCEAARIASETAPKHKHYCATSLESMVELVASSLGTRDVHAVSTEVVNRAGPTPRQAYRVEAVRPVPVPGGDMVACHRMPYAYAVFGVHGIKGAAYTVTLAGADGTMAEAVAACHGDVDGHGVAVAEAYKRLGVAPGKVAVCHFLPQDDMLWVRN

SEQ ID NO: 96 - DNA, 780 bp, Oryza sativa
atggctaggtcactcgctgctctcctactccttctggtcgccgccgcgggagacagccatgccgcgtcgccagcggagatgtactggaagatcgcgctcccgacctcgccgatgcccggcgccatccgcgacctcatcaacccggcgagctcagcggggtcagcttcgaaggaggacacggtgggcaacgtgttcttcctcgagaaggacctcttcccgggctccaagctgacgctccacttcacccgcgccaccgccggcgccgcgctgctcccccgcggccgcgccgactccgtcccgttggccaccgaaaagctcccggagatcctctcccagctctcctgcgaggccgcgccgctcgccggcgaggcgaagcaatgcgcgacgtcgctcgagtccatggtggagttcgccgcgtccagcctcggcacccgcgacgtgcacgccgtgtccacggaggtcgacagggcagggccggcgccgaggcaggcgtacagggtggaggccgtgaggcccgtgccggtgtccggcggcgacatggtggcgtgccacggcatggcctacgcgtacgccgtgttcgggtgccacacgaccacggcggcggcgtacacggtggcgctctccggcgccgacgggactagggcggaggcgctcgcggcgtgccacgccgacgcggcgccgggggtggcggaggcgtacaagaggctcggcgtggcgcccgggagcgtgccggtgtgccacttcttgccacaggacgacatgctctgggtgcgtaactga

SEQ ID NO: 97 - protein, 259 aa, Oryza sativa
MARSLAALLLLLVAAAGDSHAASPAEMYWKIALPTSPMPGAIRDLINPASSAGSASKEDTVGNVFFLEKDLFPGSKLTLHFTRATAGAALLPRGRADSVPLATEKLPEILSQLSCEAAPLAGEAKQCATSLESMVEFAASSLGTRDVHAVSTEVDRAGPAPRQAYRVEAVRPVPVSGGDMVACHGMAYAYAVFGCHTTTAAAYTVALSGADGTRAEALAACHADAAPGVAEAYKRLGVAPGSVPVCHFLPQDDMLWVRN

SEQ ID NO: 98 - DNA, 1336 bp, Oryza sativa
gtgctcagtttcactcttatcagtgaattagatcatatacttgtgtccttgatagctcgttaattagcatggctaggtcactcgctgctgtcctactccttttggtcgccgccgcgggagccagccatgccgcgtcgccggcggagatgtactggaagatcgcgctcccgacctcgccgatgcccggcgccattcgcgacctcatcagcccagcgagctcagtgggctcagcttcgaaggaggacacggtgggcaacgtgttcttcctcgagaaggacctcttcccgggctccaagatgacgctccacttcacccgcgccaccgccggcgccgcgctgctcccccgcggccgcgccgagtccgtcccgttcgcctccgaaaggctcccggagatcctctcccagctctccatcccggccgtctcgccgaccgccgacgccatgtggtccacgctcgccgagtgcgaggccgcgcggctcgccggcgagacgaccaagcacaagcactactgcgccacgtcgctcgagtccatggtcgagttcgtcgcgtccagcctcggcacccgcgacgtccacgccgtgtccacggaggtgatcagcacgttgacgccgacgccgaggcaggcgtacagggtggaggccgtgaggcccgtggcggtgcccggcggcgacatggtggcatgccacgggatgccgtacgcgtacgccgtgttcgggttgcacgggctcaagggcgcaggcggtggccgcgtgccacggggacgtggacgggcacggcgcggtggcggaggcatacaagaggctcggcgtggcgcccgggagcgtggccatctgccacttcctgcctcaggacgacatgatctgggtgcgcaactgaattaatgaagcagctaccttgcgcgccatccatggctaattattttagacatgctccttcctatattttggatctacctgccggctatcatgttatcataaatttacgcgtgtgcgcgcgacgatccgacatgcccacactaacgtgttttactttgttaattaataagtctgcatacccaggtcatcttgtacggtgctactccctctatcccgaaataaaacaacttatagagattgaagtttgtcccaaaataaaccaacttctaccttcttgcctaccatcaatgcctaccacctgtctgcaaaacaataaattttattacttcaataccccgggttggttcatgtgcagtacttaggacaagttttgtagtagatgtaaataccacatctaatttaagtcatgtcatcttctcattaattaaaagatagcaagtgcaacatattgcacttttctt

SEQ ID NO: 99 - protein, 270 aa, Oryza sativa
MARSLAAVLLLLVAAAGASHAASPAEMYWKIALPTSPMPGAIRDLISPASSVGSASKEDTVGNVFFLEKDLFPGSKMTLHFTRATAGAALLPRGRAESVPFASERLPEILSQLSIPAVSPTADAMWSTLAECEAARLAGETTKHKHYCATSLESMVEFVASSLGTRDVHAVSTEVISTLTPTPRQAYRVEAVRPVAVPGGDMVACHGMPYAYAVFGLHGLKGAGGGRVPRGRGRARRGGGGIQEARRGARERGHLPLPASGRHDLGAQLN

SEQ ID NO: 100 - DNA, 870 bp, Oryza sativa
atgcacacatatcgctctttatatcggttagctagcacagaaacggagggagtcgccgccgcgagagccagccatgccgcgtcgccggcggagctgtactggaagatcgcgctcccgacctcgccgatgcccggcgccattcgcgacctcatcaaccctgcgaggtcagcttcgcaggaggacacggacatggacgaggtgagcacggacgcggtgttcttcctcgagaaggacctgttcccgggctccaagatcacgctccacttcacccgcggcggcgcctgcgccatggtgctcctccgtggccgcgccgacgccatcccgttcgcctccgagaagctcccggagatcctcacccagctctccgtccccgccggctcacgcgccgccgaggacatgcggaccaccctcgccgagtgcgaggccgcgctgctcggcgcccgcgaccaggccaagcactgcgtgacgtcgctcgagtccatggtcgagttcgccgccgccagcctcggcacccgcgacatccgcgccgtctccacggaggtgatcggcacgggggcggcggagacgccgaggcaggagtacacggtggaggccgtgaagcccgtcgtgtctgtctccggcggcaacatggtgacgtgccacgggatgccctacgcgtacgccgtgttcgggtgccacacgaccacggccaccgcgtacgcggtgacgctcgccggtgccgatgggacccgggcggaggcgctcgcgacgtgccacggcgacgcgttccccggcgtggcggaggcgtacgagagggtcggcgtggcggccgggagcgtgccggtgtgccacatcatgccgctgggcgacatgctgtgggtgcgcaactga

SEQ ID NO: 101 - protein, 289 aa, Oryza sativa
MHTYRSLYRLASTETEGVAAARASHAASPAELYWKIALPTSPMPGAIRDLINPARSASQEDTDMDEVSTDAVFFLEKDLFPGSKITLHFTRGGACAMVLLRGRADAIPFASEKLPEILTQLSVPAGSRAAEDMRTTLAECEAALLGARDQAKHCVTSLESMVEFAAASLGTRDIRAVSTEVIGTGAAETPRQEYTVEAVKPVVSVSGGNMVTCHGMPYAYAVFGCHTTTATAYAVTLAGADGTRAEALATCHGDAFPGVAEAYERVGVAAGSVPVCHIMPLGDMLWVRN

SEQ ID NO: 102 - DNA, 720 bp, Oryza sativa
atgcccggcgccattcgcgacctcatcaacccagtgagctcagcggcctcagcttcgaaggaggacacggtgaacaacgtgttcttcctcgagaaggacctcttcccgggctccaagatgacgctccacttcacccgcgccaccgccggcgccgcgctgttgccccgcggccgcgccgactccgtcccgttcgcctccgaaaagctcccggagatcctctcccagctctccgtccccgccggctccccggccgccgacgccatgaggtccaccctcgccgagtgcgaggccgcgccgcaggccggtgaggccaagcgctgcgcgacgtcgctcgagtccatggtggagttcgccgcgtccagcctcggcacccgcgacgtgcacgccgtgtccacggaggtcgacagggcagggccgacgccgaggcaggcgtacagggtggaggccgtgaggcccgtgccggtgtccggcggcgacatggtggcgtgccacggcatggcctacgcgtacgccgtgttcgggtgccacacgaccacggcggcggcgtacacggtgacgctggccggcgccgacgggaccaaggcggaggcgctcgcggcgtgccacaccgacgcggcgcccagggtggcggaggcgtacaagaggctcggcgtggcgcccgggagcgtgccggtgtgccacttcctgccacaggacgacatgctctgggtgcgcaactga

SEQ ID NO: 103 - protein, 239 aa, Oryza sativa
MPGAIRDLINPVSSAASASKEDTVNNVFFLEKDLFPGSKMTLHFTRATAGAALLPRGRADSVPFASEKLPEILSQLSVPAGSPAADAMRSTLAECEAAPQAGEAKRCATSLESMVEFAASSLGTRDVHAVSTEVDRAGPTPRQAYRVEAVRPVPVSGGDMVACHGMAYAYAVFGCHTTTAAAYTVTLAGADGTKAEALAACHTDAAPRVAEAYKRLGVAPGSVPVCHFLPQDDMLWVRN

SEQ ID NO: 104 - DNA, 1089 bp, Triticum aestivum
atggcgcgcttcctcgtcgccctcctcgctgccaccctggtcgcggttcaggctggagggcagctgggccacgcggcgccggctacgggggaggtgttctggcgcgccgtgctgccgcactcgccattgcctgacgccgttctccgcctcctcaaacaacctgcagcagaatccaccagcttcgtgagagaccccgaggacaggccccccttcgactaccgtgattacagccgctcgtcgtccgatgatgaaccgagcaagagcaccgtcgccgcctccggagcggggggcttcgactacgacaactacagcggggccgacgaacgtcgtggtgccaccgatgaatacaaggcgccgagcagcagcctcgctggaagcggggcgtacatggctaggggcggcaaggcggagacgacgacggtgttctttcacgaggaggcggtgcgcgtcggcaggaggctcccattccacttcccgccggcgactcccgccgctctcggtttcctgccgcgccaggtcgccgactccgtcccgttcacgacggccgcgctgcccggcatcctcgcgacgtttggcatcgcgtccgactccaccacggtgcccagcatggaggcgacgctgcgcgcctgcgagtcgcccaccatcgccggggagtccaagttctgcgcgacttcgctggaggccctggtggagcgcgccatgggagtgctggggacccgggacatcaggccggtgacgtcgacgctgccccgcgccggcgccccgctgcagacgtacaccgtcgtcgccgtgcagccggtggagggggggcctgtcttcgtggcgtgccacgacgaggcctacccgtacaccgtgtaccggtgccacaccaccggcccgtccagggcgtacacggtggacatggagggcgcgcgcggcgccgacgcggtgaccatcgccgccgtgtgccacaccgacacgtccctgtggaacccggagcacgtctccttcaagctcctcggcaccaagcccggcggcacgccggtctgccacctcatgccgtacgggcacataatctgggccaagaacgtgaagcgctcgccggcgtga

SEQ ID NO: 105 - protein, 362 aa, Triticum aestivum
MARFLVALLAATLVAVQAGGQLGHAAPATGEVFWRAVLPHSPLPDAVLRLLKQPAAESTSFVRDPEDRPPFDYRDYSRSSSDDEPSKSTVAASGAGGFDYDNYSGADERRGATDEYKAPSSSLAGSGAYMARGGKAETTTVFFHEEAVRVGRRLPFHFPPATPAALGFLPRQVADSVPFTTAALPGILATFGIASDSTTVPSMEATLRACESPTIAGESKFCATSLEALVERAMGVLGTRDIRPVTSTLPRAGAPLQTYTVVAVQPVEGGPVFVACHDEAYPYTVYRCHTTGPSRAYTVDMEGARGADAVTIAAVCHTDTSLWNPEHVSFKLLGTKPGGTPVCHLMPYGHIIWAKNVKRSPA

SEQ ID NO: 106 - DNA, 2109 bp, Hordeum vulgare
atggatttgtttctgccactcctctcatttcttttgattcttggaggacaaggtagccatcatgcaagttttgccgatgcgcccaagatgactttgacaaacatggagacgctgatggcatactgggaggcggcgcttccaggaattccgattcccgcagctataagcgacctgttagcccaacaaaaagggctgccaaaaattggaccaaactatgagagagtcaagtcagaagctggtcacagggaaaaccatgttcatatcatatcacaagttgaagatgatttaaaagaggcccatgggtatcatggtgaacaaggtataaagaaggtcgtgatggcacatgagccaaacattggtaagcatctgaagagacaaccattctcagatgggttacaagctaagaattatgtagaagaacaaattgctgggcatagaacaaaaatcgaagaaaatctaaaggaaatatcagtgtcatatgggtcagaaggtgatcataattataagaaagttccactaaatttgaagaagatcgttgcagcatatacaccattgaaagataaaagccttaaggaaatatctgtgtcatatggattaaaagttggagaagcccacaaagaagtttcagggtcgtatggtttagaaagtgaaaataatttaaaagaaatatcactgtcatatggtgtaaacagtgatgatactccaaaggaagagtcgccacatgaagagaatgtaaatgaaatctcagtgtcatatgggttagaaggttcaaagagtttaaagaaagttccactaaatttaaagaaaatcctggtagcacacacaccttggaaagatggaaatctaaaggaaatatctgtatcatatggatcaaaaggccaagagatttcaaaggaagcaaaaggaatatttgggttaaaaggtgaaaaggatttgaaagaaatctcggtgtcttatggtgttgatgaccatgaaaatatgaaggaaatatctgtgacatacggatcaaaagatcaagaaactctaaaggaatcctcaggatcatatgggtttgaaggtaaaaaggatttaaaagaaatttcagtgtcttatggcgcgggcggccatgaaaatctgaaggaaatatccgtatcatatggatcaaaggaccaaaaaaatcacaaggaaggagaaggatcttatgcgttgaaaggtgaaactgatataaaagaaatctcagtgtcctatggtgtagacagccaggagtttgtaaagggattatccccatcacacgaagaaaatccaaaggaagtcacgatttcatatgggtcaattgaagataaagatgaacaagtcgacgctctgcataaagtaaaaggagaggggagccaccatgttcacactcacagctacaagaacaagaaagaggcagatgtctttttcttccaagacatgttgaggccagggtccttgatcaccccgaccatcccgccgactacctccatgccggcgcttctctcaggcgacgtcgccgactccatcccgttctccgccgagcacctctcagacatcatcacaatgttcgcaccggcgtccctcgccatgaccagagagatacggtggacgctggacacctgcgagcacccacggacgctccccggccagaaagcaggctgcgccacctccctcgagtccctcgccgagctgccggcgtccctccttgggaggcgtaacatccgtgcgttctccgccatggatctacccatggatgccccagggacaccggcgcttaggggtaagtacaacgtgacggctgcacggaagctctccgggtcatcatctgaggtcgtgacctgccatgacctgacctacccttacgcggtgtactactgccacacatccagccctacggccgcctacatggtgacactgacgagcgtggaggaggatacctcgccggcgacgatggaggtcatggccgtgtgccaccttgacacgtcattgtggagcccgaagaatccgttctttgagctgcacaaagttgggccaggtgatgtggccgtgtgccactttctcactaagctgagcatcatctgggtgtcagttgacgggcatgtcgacgcactgtag

SEQ ID NO: 107 - protein, 702 aa, Hordeum vulgare
MDLFLPLLSFLLILGGQGSHHASFADAPKMTLTNMETLMAYWEAALPGIPIPAAISDLLAQQKGLPKIGPNYERVKSEAGHRENHVHIISQVEDDLKEAHGYHGEQGIKKVVMAHEPNIGKHLKRQPFSDGLQAKNYVEEQIAGHRTKIEENLKEISVSYGSEGDHNYKKVPLNLKKIVAAYTPLKDKSLKEISVSYGLKVGEAHKEVSGSYGLESENNLKEISLSYGVNSDDTPKEESPHEENVNEISVSYGLEGSKSLKKVPLNLKKILVAHTPWKDGNLKEISVSYGSKGQEISKEAKGIFGLKGEKDLKEISVSYGVDDHENMKEISVTYGSKDQETLKESSGSYGFEGKKDLKEISVSYGAGGHENLKEISVSYGSKDQKNHKEGEGSYALKGETDIKEISVSYGVDSQEFVKGLSPSHEENPKEVTISYGSIEDKDEQVDALHKVKGEGSHHVHTHSYKNKKEADVFFFQDMLRPGSLITPTIPPTTSMPALLSGDVADSIPFSAEHLSDIITMFAPASLAMTREIRWTLDTCEHPRTLPGQKAGCATSLESLAELPASLLGRRNIRAFSAMDLPMDAPGTPALRGKYNVTAARKLSGSSSEVVTCHDLTYPYAVYYCHTSSPTAAYMVTLTSVEEDTSPATMEVMAVCHLDTSLWSPKNPFFELHKVGPGDVAVCHFLTKLSIIWVSVDGHVDAL

SEQ ID NO: 108 - DNA, 1179 bp, Arabidopsis thaliana
atggcgattcgtcttcctctgatctgtcttcttggttcattcatggtagtggcgattgcggctgatttaacaccggagcgttattggagcactgctttaccaaacactcccattcccaactctctccataatcttttgactttcgattttaccgacgagaaaagtaccaacgtccaagtaggtaaaggcggagtaaacgttaacacccataaaggtaaaaccggtagcggaaccgccgtgaacgttggaaagggaggtgtacgcgtggacacaggcaagggcaagcccggaggagggacacacgtgagcgttggcagcggaaaaggtcacggaggtggcgtcgcagtccacacgggtaaacccggtaaaagaaccgacgtaggagtcggtaaaggcggtgtgacggtgcacacgcgccacaagggaagaccgatttacgttggtgtgaaaccaggagcaaaccctttcgtgtataactatgcagcgaaggagactcagctccacgacgatcctaacgcggctctcttcttcttggagaaggacttggttcgcgggaaagaaatgaatgtccggtttaacgctgaggatggttacggaggcaaaactgcgttcttgccacgtggagaggctgaaacggtgccttttggatcggagaagttttcggagacgttgaaacgtttctcggtggaagctggttcggaagaagcggagatgatgaagaagaccattgaggagtgtgaagccagaaaagttagtggagaggagaagtattgtgcgacgtctttggagtcgatggtcgactttagtgtttcgaaacttggtaaatatcacgtcagggctgtttccactgaggtggctaagaagaacgcaccgatgcagaagtacaaaatcgcggcggctggggtaaagaagttgtctgacgataaatctgtggtgtgtcacaaacagaagtacccattcgcggtgttctactgccacaaggcgatgatgacgaccgtctacgcggttccgctcgagggagagaacgggatgcgagctaaagcagttgcggtatgccacaagaacacctcagcttggaacccaaaccacttggccttcaaagtcttaaaggtgaagccagggaccgttccggtctgccacttcctcccggagactcatgttgtgtggttcagctactag

SEQ ID NO: 109 - protein, 392 aa, Arabidopsis thaliana
MAIRLPLICLLGSFMVVAIAADLTPERYWSTALPNTPIPNSLHNLLTFDFTDEKSTNVQVGKGGVNVNTHKGKTGSGTAVNVGKGGVRVDTGKGKPGGGTHVSVGSGKGHGGGVAVHTGKPGKRTDVGVGKGGVTVHTRHKGRPIYVGVKPGANPFVYNYAAKETQLHDDPNAALFFLEKDLVRGKEMNVRFNAEDGYGGKTAFLPRGEAETVPFGSEKFSETLKRFSVEAGSEEAEMMKKTIEECEARKVSGEEKYCATSLESMVDFSVSKLGKYHVRAVSTEVAKKNAPMQKYKIAAAGVKKLSDDKSVVCHKQKYPFAVFYCHKAMMTTVYAVPLEGENGMRAKAVAVCHKNTSAWNPNHLAFKVLKVKPGTVPVCHFLPETHVVWFSY

SEQ ID NO: 110 - DNA, 1164 bp, Brassica napus
atggcgattcgtctttcgttgatatgccttcttgtttcagtcacggccattgcggctgatttaacgccggagcgttattggaactctgccttaccaaacactcccataccaaactctcttcgccatctttttacgtcagattttagcgacgaggaaagcaccaacgtccaagtagggaaaggaggcgtgaacgtttacaccggaaaaggtaagcctggcggaggaaccgccgtgaacgttggaaagggaggtgtacatgtgaacaccggcaagggtaagggaacacacgtgagcgttagcggtggaaaaggccacggaggaggcgtcggcgtccacaccgggaagccaggaaagagaaccgacgtaggagttggcaaaggtggcgttatagtgcacacgcgccacaagggaaagccggtctacgtcggggtgaaaccaggacataacccttttgcgtataactatgcagcgagcgagactcagctccacgacgatcccaaagctgctctcttcttcttggagaaagacatggttcccggaaaagctatgaacctcaggtttaatgcggaggacggctacaacggcaaaaccgcgttcttgccacgtggagaggcggaaacggtgccgttcgggtctgagaagtcctcggagatcttgaacacgttctcggtgaaacctggctcgggagaagcagagatgatgaagaaaacgattgaggagtgtgaagcgaaaagagtcggtggcgaagagaagtattgtgctacgtctttggagtcgatggtggacttcagcgtttctaaacttggcaaagatcacgttcgtgctgtctccactgaggtggctgagaagaatgcaccgatgcaaaagtacagaatcgcggcggctggggtaaagaagttgtcagacgacaagtcggtggtgtgtcacaaacagaagtacccattcgctgtgttctactgccacaaggcgatgatgacgagcgtttacgcggttcccctcgaaggagagaacgggttgcgtgctaaagcggttgcggtatgtcacaagaacacctcggcgtggaacccaaaccacttggcctttaaagtccttaaggtgaagcctgggagtgttccggtctgccatttcctccctgaaacccatgttgtttggttcagctactag

SEQ ID NO: 111 - protein, 387 aa, Brassica napus
MAIRLSLICLLVSVTAIAADLTPERYWNSALPNTPIPNSLRHLFTSDFSDEESTNVQVGKGGVNVYTGKGKPGGGTAVNVGKGGVHVNTGKGKGTHVSVSGGKGHGGGVGVHTGKPGKRTDVGVGKGGVIVHTRHKGKPVYVGVKPGHNPFAYNYAASETQLHDDPKAALFFLEKDMVPGKAMNLRFNAEDGYNGKTAFLPRGEAETVPFGSEKSSEILNTFSVKPGSGEAEMMKKTIEECEAKRVGGEEKYCATSLESMVDFSVSKLGKDHVRAVSTEVAEKNAPMQKYRIAAAGVKKLSDDKSVVCHKQKYPFAVFYCHKAMMTSVYAVPLEGENGLRAKAVAVCHKNTSAWNPNHLAFKVLKVKPGSVPVCHFLPETHVVWFSY

SEQ ID NO: 112 - DNA, 2241 bp, Oryza sativa
atccttcgtagtgcaattcacttatacacggagtttaattagtttattgccttctacaatggataggatcttcgcccgtttcttttgcttcctactgattgcggcagtaagccatgcagctgatctgtcccccgagcaatactggcgatccatcctccctaacaccccaatgccaagctccatctcccaacttcttaactacccttacttgcctgctgttagattacctcgccgtacggatgctggtcagcgcaactacaaatcatcagtttcacatgtggctgaacgatctcaccgtgtagatgatggccaacgcaactacaagttatcagctttacctgccactaatgaactacctcaccgtacggatgctggtcaacgcaactacaagtcatcagtttcacctgtggctgaactacctcaccgtgtagatgatggccaacgcaactacaagttatcagctttacctgccactaatgaactacctcaccgtacggatgctggtcaacgcaactacaagtcatcagtttcacctrtggctgaactayctcaccgtgtagatgatggycaacgcaactacaagttatcagctttacctgccactaatgaactacctcaccrtacggatgctggtcaacgcaactacaagtcatcagtttcacctatggctgaactayctcaccgtgtagatgatggtcaacgcaactacaagttatcagctttacctgccactaatgaactacctcaccrtacggatgctggtcaacgcaactacaagtcatcagtttcacctgtggctgaactacctcaccgtgtagatgatggtcaacgcaactacaagttatcagctttacctgccactaatgaactacctcaccgtacggatgctggtcaacgcaactacaagtcatcagtttcacctgtggctgaactacctcaccgtgtagatgatggccaacgcaactacaagttatcagctttacctgccactaatgaactacctcaccgtatagatgctggtcaacgcaactacaagtcatcagtttcacctatggctgaactacctcaccgtgcagatgatggtcaacgcaactacaagttatcagtttcacctgctgctgaactacctcaccgtgtagatgatggtcaacgcaattacaagttatcagttttacctgccactgaactagttcactatacagatggtcaacgcaattacaagtcatcagttttggagacgccagaacttctcaaagaccccgacatggcgctcttcttccttgagaagaatcttcaacaaggtaaaaaaattaataacgccctccacttcgccaacttgttggccactacgaactccaagttcctgccacgaggcaaggcggactccatcccgttctcctctaaagaactacccgagatcctggaccggttcggggtgcggccgggctccgacgacgcggctgagatgagtgctacgctgcaggactgcgagctgccggcgaataagggagagaagaaggcctgcgccacgtcgctggagtctatagtcgacttcgtcacatccagctttggggccagtgacgtcgacgccgcctccaccgttgtgctcagtaaggcggtggagtcttcttcgctggcgcaggactacacggtgagcggcgtgaggcgaatggccggaaccggccagctcatcgcttgccatccggagtcgtacccgtacgctgtgttcatgtgccacctcacagaggcgacgacgagggcgtacaaggcctcattggtcggcaaagatggtactgcggtggaggcggtcgccgtgtgccacaccgacacgtcggactggaacccagagcacgctgccttccatgtgctcggcgtcaagcctgggactgtgcctgtctgccacttcatgcagcctgacgctgtcgtctggacccgcaggggctgatgtatgtatgtatgccatatagtacctacttcatcgtactgtactgcgtacgcatgctgccagctgctttgcataccttgctgctggagatatataattaatatccagcacttatatactcgtcacttctatcgtgtgtcgaaggttatatacttgtagcatttggggatgcagtacgtacgtgtgtctgtaataagtttcgtgatatgttgcttcatccatatggaccatatgtaccaccaatcccagtgatatataataatataatatcgttgtctagtactacttgcttatct

SEQ ID NO: 113 - protein, 628 aa, Oryza sativa
  misc_feature (160)..(160): Xaa can be any naturally occurring amino acid
  misc_feature (164)..(164): Xaa can be any naturally occurring amino acid
  misc_feature (170)..(170): Xaa can be any naturally occurring amino acid
  misc_feature (188)..(188): Xaa can be any naturally occurring amino acid
  misc_feature (207)..(207): Xaa can be any naturally occurring amino acid
  misc_feature (231)..(231): Xaa can be any naturally occurring amino acid
MDRIFARFFCFLLIAAVSHAADLSPEQYWRSILPNTPMPSSISQLLNYPYLPAVRLPRRTDAGQRNYKSSVSHVAERSHRVDDGQRNYKLSALPATNELPHRTDAGQRNYKSSVSPVAELPHRVDDGQRNYKLSALPATNELPHRTDAGQRNYKSSVSPXAELXHRVDDXQRNYKLSALPATNELPHXTDAGQRNYKSSVSPMAELXHRVDDGQRNYKLSALPATNELPHXTDAGQRNYKSSVSPVAELPHRVDDGQRNYKLSALPATNELPHRTDAGQRNYKSSVSPVAELPHRVDDGQRNYKLSALPATNELPHRIDAGQRNYKSSVSPMAELPHRADDGQRNYKLSVSPAAELPHRVDDGQRNYKLSVLPATELVHYTDGQRNYKSSVLETPELLKDPDMALFFLEKNLQQGKKINNALHFANLLATTNSKFLPRGKADSIPFSSKELPEILDRFGVRPGSDDAAEMSATLQDCELPANKGEKKACATSLESIVDFVTSSFGASDVDAASTVVLSKAVESSSLAQDYTVSGVRRMAGTGQLIACHPESYPYAVFMCHLTEATTRAYKASLVGKDGTAVEAVAVCHTDTSDWNPEHAAFHVLGVKPGTVPVCHFMQPDAVVWTRRG

SEQ ID NO: 114 - DNA, 1764 bp, Oryza sativa
aaaggcccatcacctgcatcgttccaagcgcagctcaatctttgcctcgtcaggttttgctcattggcgtctccatggataggctcctcgcctgcctccttggcttcctgttgatcgcttcagtaggaagccatgccgctcggactccggagcaatactggaaatcagctcttcccaactctcccatcccgagctcgctctctcagcttctcagcactgcaggcggaggcacgtcggtgaacgtcggcgggggcggcgtccatgtcgacgcggggcacggcaagcccggcggcacaaccgttgatgtaggcaagggtggcgtcggcgtgaacgtgaagcctggttacggcaagcccggcggcaccacggtcggcgtcgggaagggcggcgtgggagtcaacgtcaagcctggctatggcaagcccggaggcaccagcgtcggcgtcgggaaaggaggcgtgggcgtgaacgtgcagcctgggtacggcaagcccggcggcaccaccgtcggcgtcggtaagggcggcgtcggcgtgaacgtgcagccaggctacggcaagcccgggggcaccaccgtcggcgtcgggaagggcggcgtcggcgtcaacgtgaagccccggggcaagcctgtccacgtcaacgtcgcacctttcatctacaactacgccgcaacggagacgcagctgcacgacgaccccaacgtggcgctcttcttcttggagaaggacctccaccccgggaagacgatggccgtacatttcacggccaccaccgccggagagaagttcctccccaggagcgaggccgacgccatgccgttctcctccgagaaggtcccggagatcctcagccgcttctccgtgaagccgggctccgtcgaggcggcggagatggcgcagacgctgcgcgactgcgaggcgccgccggcgcagggcgagaggaaggcgtgcgccacgtcgctcgagtccatggtcgacttcgccacgtcgagcctcgggaccagccacgtgagggccgcgtcgaccgtggtcgggaaggaagggtcgccggagcaggagtacaccgtgacggcggtgaagcgcgcggcggccggcggcgaccaggaccagctcgtcgcctgccacgcggagccgtacgcgtacgccgtgttcgcgtgccacctgacgcgggcgacgcgggcgtacgcggtgtcgatggccggcagggacggcacgggcgtggaggccgtcgcggtgtgccacgccgacacggccgggtggaacccgaagcacgtcgcgttccaggtgctcaaggtgaagccaggcacggtgccggtctgccacttcctgccgcaggaccacgtcgtctggacacgcagcggctagctgatgatcggctgccaatcttggcgcctgatcgagttggttgcttatgctctagaatctagctaggctccatgcagatgctatactgtatggtgtcttactatcttacatatttgtatgcacgcaatttggttctttgttatttggatggtgttgccagcatcgccagcctgctagtagatgatacgggtgggcttgctgtttgatgtatagttttagtatgcgggtgcaataaacagacaagtatttacttatctctttatcagtgccatctagctccgttcgatcattcctaaggaaactcaatcaagcagggcaaagaccccaagactgaagatggtagtacagtgctctcacctaaattctaatggcaatgcaaacagtcaaatgtgtttgattt

SEQ ID NO: 115 - protein, 429 aa, Oryza sativa
MDRLLACLLGFLLIASVGSHAARTPEQYWKSALPNSPIPSSLSQLLSTAGGGTSVNVGGGGVHVDAGHGKPGGTTVDVGKGGVGVNVKPGYGKPGGTTVGVGKGGVGVNVKPGYGKPGGTSVGVGKGGVGVNVQPGYGKPGGTTVGVGKGGVGVNVQPGYGKPGGTTVGVGKGGVGVNVKPRGKPVHVNVAPFIYNYAATETQLHDDPNVALFFLEKDLHPGKTMAVHFTATTAGEKFLPRSEADAMPFSSEKVPEILSRFSVKPGSVEAAEMAQTLRDCEAPPAQGERKACATSLESMVDFATSSLGTSHVRAASTVVGKEGSPEQEYTVTAVKRAAAGGDQDQLVACHAEPYAYAVFACHLTRATRAYAVSMAGRDGTGVEAVAVCHADTAGWNPKHVAFQVLKVKPGTVPVCHFLPQDHVVWTRSG

SEQ ID NO: 116 - DNA, 1128 bp, Zea mays
atggagaggctccttgccggcctactactcggcttcctattattgatcgcgtcagtaggaagccatgcaactcgtgctccagatcagtactggaagtctgctcttcccgacactcccatgccgagctccctctcccaactcctcaacaccccagctggcaagggcggcgtcggtggaggcagcagcggcaagaagcccggcggcaccacggtgggagttgggaaagggggagtgggcgttaacgttaaccctaccaaacccggcggcgccggtacaaccgttggcgttggcaaaggtggcgtcggcgtcggcgtcaatcccgggtacggcaagccgggtggcaccacggtgggcgttggcaagggcagggttggcgtccacgtgaacccgggcaagaagcccgtccacgtccccgtcggccctttccagtacgagtacgccgcatcggagacgcagttgcacgacgaccccagcgtggcgctcttcttccgagaggaggacctgcagcccggtaagaagacgaccgtccagttcgccaacaccgcgatggccggcgccaagttcctcccgcgaagcgatgccgaggccatcccgttctcctccgagaaggtccccgagatcctcggccgcttctcggtggacccggactccgtggaggcggcggagatggcgcagacgctgcacgactgcgaggcgcccgcggccaggggcgagaggaaggcgtgcgccacgtcgctggaatccatggtggactttgccaccgccagcctcgggaccagccacgtgagggccgcgtcgacggtcgtggggagggagggctcgccgaggcaggagtacaccgtgacaggcgtgaagcgggcgggcggcgggcgcctggtggcctgccacgcggagccgtacgcgtacgccgtgttcgcgtgccacttgacgcagcagacgcgggcgtactcggtgtcgatgctgggcagggacggcacggccgtggacgctgtcgcggtgtgccacgccgacacgtccggctggaaccccaagcacgtcgcgttccaggtgctcagggtgaagcccggcacggtgccgatctgccacttcctgccgcaggaccacgtcgtctggacccgcggcggctga

SEQ ID NO: 117 - protein, 375 aa, Zea mays
MERLLAGLLLGFLLLIASVGSHATRAPDQYWKSALPDTPMPSSLSQLLNTPAGKGGVGGGSSGKKPGGTTVGVGKGGVGVNVNPTKPGGAGTTVGVGKGGVGVGVNPGYGKPGGTTVGVGKGRVGVHVNPGKKPVHVPVGPFQYEYAASETQLHDDPSVALFFREEDLQPGKKTTVQFANTAMAGAKFLPRSDAEAIPFSSEKVPEILGRFSVDPDSVEAAEMAQTLHDCEAPAARGERKACATSLESMVDFATASLGTSHVRAASTVVGREGSPRQEYTVTGVKRAGGGRLVACHAEPYAYAVFACHLTQQTRAYSVSMLGRDGTAVDAVAVCHADTSGWNPKHVAFQVLRVKPGTVPICHFLPQDHVVWTRGG

SEQ ID NO: 118 - DNA, 1197 bp, Oryza sativa
atgtggcatcctaaaagcgctctcaagctgccacgtggtgggaggagaggagatgaggacccacaaaaaaaacgaaatcctctcccacaacgtccgcatgtacgcatgcatgtggatgctttcctcccatgcttagcggcaggattaccaagtaatcagggttttacattaataaggttttttttctgttatttggatcgtctatctggagtaaacgatcttatgtgtgcgaccctatgtactttgctggatgagatctctatcttaatattgatgctgctcttgattcaactggagattagggtttcggcggcacaggggggaggaagccatgcagctatgtcccccgagcaatactggcgatccatcctccccgacagtacccctatgccgatctccatttcccaactccttggcgatggttacccttactcaccagctgttggattaccgaagcgtggagaccgtgttcagattaggtacggtccgaatatttacgggcttgcagcgtcgcagcagttcttcaaagacccaaccatgggactcttcttccttgagacaaacctccaaagcagcaaaagtattaaactgcacttcgccaacatgatggctggcaccaagtttctgccccgaggcgaggccgacgccgtcccattctcctccaaggatctccaggagatcctcgcgcgattcggggtgcggccgggctccgtggacgcgtcggtggtgaagaacacactgctggagtgcgagctaccggcgaacaaaggcgagaagaaggcttgcgccacatcactggagtcgatggtcgacttcgtagcatccagcctggggaccagagacatcaaggccgcctccaccttcctggtcggcaaggacggggacactccggctcaggagtacacggtcaccggcgcgcggcgcatggctgaaactgggcaactcatcgcttgccatcccgagtcgtacccatatgctgtgttcatgtgccacctcacagaggcgacgagggcgtacaaggcgtcgttggtcggcaaagacggtgcggcggtggaggcggtcgccgtatgccacaccgacacggcagagtggaacccaaagcacgctgccttccaggtgctcggcgtcaagcctgggacggtgccggtctgccacttcgtgcagcctgacgttgtcgtctggacccgccgtggctga

SEQ ID NO: 119 - protein, 398 aa, Oryza sativa
MWHPKSALKLPRGGRRGDEDPQKKRNPLPQRPHVRMHVDAFLPCLAAGLPSNQGFTLIRFFFCYLDRLSGVNDLMCATLCTLLDEISILILMLLLIQLEIRVSAAQGGGSHAAMSPEQYWRSILPDSTPMPISISQLLGDGYPYSPAVGLPKRGDRVQIRYGPNIYGLAASQQFFKDPTMGLFFLETNLQSSKSIKLHFANMMAGTKFLPRGEADAVPFSSKDLQEILARFGVRPGSVDASVVKNTLLECELPANKGEKKACATSLESMVDFVASSLGTRDIKAASTFLVGKDGDTPAQEYTVTGARRMAETGQLIACHPESYPYAVFMCHLTEATRAYKASLVGKDGAAVEAVAVCHTDTAEWNPKHAAFQVLGVKPGTVPVCHFVQPDVVVWTRRG

SEQ ID NO: 120 - DNA, 978 bp, Medicago trunactula
atggattttcatcttgttcacatcattacttttttcatgcttgtggtaggggcaactaatgctgtaatgttacctcctcaactttactggaagtccatgcttcccaactctccaatgccaaaagccatcactaatctgctacaccctgctggatattggagtgaagagaaaggaacttgggtggatgtaggcaagggtggtgtggatgttggagtcagaaagggctactatgaaggaggtggcactgatgtgaatgttggagttggacgttctccatttatttataattatgctgcaagtgagactcaattacatgataaaccaaatgtagcactcttctttctggaaaaggacctgcatcatggaacaaaactgaacttgcaattctctaagaccacttcaaatgcagccacattcttgccgcgccaagttgctaattcaatacccttttcatcaaacaagatggaatacataatcaacaagttaaacatcaagaaagggtcaaagggtgttcagattgtgaagaacaccatcagtgagtgtgaagagcaagggatcaaaggagaggaaaaggtttgcgtaacatcattggagtctatggttgatttcacgacttctaaacttggtaaaaatgttgaggctgtttcaacagaagtgaacaaagaaagtaatttacaacaatatacaatagcatctggagtgaagaagttgggtgagaagaacaaagctgttgtgtgtcacaaagagaattacccttatgcagtgttttactgtcacaaaacagatacaactaaagcttactctgtgcctttggagggtgctgatggaagcagagttaaagctattgctgtgtgtcacactgatacatcagaatggaacccaaaacacttggcatttcaagtactcaaagttcaacctgggactgttccagtttgtcacctcctacctgaggatcatgttgtttggattcgcaagtag

SEQ ID NO: 121 - protein, 325 aa, Medicago trunactula
MDFHLVHIITFFMLVVGATNAVMLPPQLYWKSMLPNSPMPKAITNLLHPAGYWSEEKGTWVDVGKGGVDVGVRKGYYEGGGTDVNVGVGRSPFIYNYAASETQLHDKPNVALFFLEKDLHHGTKLNLQFSKTTSNAATFLPRQVANSIPFSSNKMEYIINKLNIKKGSKGVQIVKNTISECEEQGIKGEEKVCVTSLESMVDFTTSKLGKNVEAVSTEVNKESNLQQYTIASGVKKLGEKNKAVVCHKENYPYAVFYCHKTDTTKAYSVPLEGADGSRVKAIAVCHTDTSEWNPKHLAFQVLKVQPGTVPVCHLLPEDHVVWIRK

SEQ ID NO: 122 - DNA, 1206 bp, Populus trichocarpa
atggagttccatcttacacgcattcttgctttcctttcttttgcacttgtggtaagccacgctgccttgccacctgaactttactggaactctgtgctgcctaacactcctatgccaaaatctgtcagagatcttctacacccagacttggtggaagacaaaagcacttctgttgctgtagggaagggtggtgtaaatgttgatgcaggaaaagggaagccagggggcactgctgttaatgtaggaaagggtggtgtgagtgttgatgcagggaaaggaaagcccggaggaaccaatgtaaatgcaggaaagggtggtgtgaatgttgatgctgggaaaggaaagccaggcagcggcacccatgtcagcgtcgggggcaaaggtgttggtgttgccgctggaaagccagggaagagaaccgatgttggtgttggcaaaggcggagtatctgtgagcaaagggcaccatggcaagcccgtaattgttggggtacgcccagggccaggcccgttcaactacatttatgctgcaactgagactcaactccatgatgacccaaatgtagccctttttttcttggagaaagacatgcatccaggcaaaattatgaacttgcaattcactgaaaacactaacacagcaactttcttaccacgtcaagtcgccgattcaatacccttttcatctgacaaattgccagaaatctacagtgagttttcagtgaaacctggatcaatggaagctgcggagatggagaatacaatcaaggaatgtgaaagccctggaattaaaggagaggagaaatactgcgcgacatcactagagtcaatgattgacttcagcacttccaaattaggaaagaatgttcaggcaatctccacagaagtggacaaccaaaccaagatgcagaagtatacaattaagaccggagtaaagaaggtggcaggagacaaatctgtagtgtgccacaagcagaactatgcatattccgtcttttactgccatgcaacgcaaaccactagggcttacacggttcccttggagggtgatgatggaacaaaggctaaagctgtagcagtgtgccacacagatacgtcagcatggaacccaaagcatttggctttccaggtgctcaacgttaagccaggaaccgtaccagtctgccatttccttcctcaggatcatgttgtgtggttttccaactag

SEQ ID NO: 123 - protein, 401 aa, Populus trichocarpa
MEFHLTRILAFLSFALVVSHAALPPELYWNSVLPNTPMPKSVRDLLHPDLVEDKSTSVAVGKGGVNVDAGKGKPGGTAVNVGKGGVSVDAGKGKPGGTNVNAGKGGVNVDAGKGKPGSGTHVSVGGKGVGVAAGKPGKRTDVGVGKGGVSVSKGHHGKPVIVGVRPGPGPFNYIYAATETQLHDDPNVALFFLEKDMHPGKIMNLQFTENTNTATFLPRQVADSIPFSSDKLPEIYSEFSVKPGSMEAAEMENTIKECESPGIKGEEKYCATSLESMIDFSTSKLGKNVQAISTEVDNQTKMQKYTIKTGVKKVAGDKSVVCHKQNYAYSVFYCHATQTTRAYTVPLEGDDGTKAKAVAVCHTDTSAWNPKHLAFQVLNVKPGTVPVCHFLPQDHVVWFSN

SEQ ID NO: 124 - DNA, 1198 bp, Vitis vinifera
atggagttttacctccttcccattctggcttttctctctctaactctaacagccggtgatgctgatctaccttctgaagtttactggagttctgtgcttccaaacaccccgatgccacaagctgtcaagaatagtctacgtccagacctgctggaagaccaaagcacccctgtagagatagggaaaggcactagtatgggtttcagcaaagaaggaggagctatgaacatgtatgctggagttaagccagcgaaagcagcgatgcccttctcataccattatgctgctacaaaggatcagctccatgcctaccctaatgtggccattttcttcttggagaaggacatgcatcccggcatgaagctgaccttgcacttcaccaagactacaaatgctactttcttacctcaccaagtagctaattcattacccttctcttcagacaagttggctgaaattctggaccagttgtccataaaaccagaatcagtagaagctgagacaatcaagaatacgattgaagagtgtgaggaccctggaattaaaggggaggaaaagtattgtgcaacctcattagaatccatgattgatttcagcacctcgaagctggggaataagggtgtcaaggccgtttcaacagaggcagaaaacaagtcccagatgaagtacagaattgcagctggtttggagaagatgggaggcgacttctctgtggtgtgccataaaatgaattacccatatgcagtgttttactgtcataagatccaggccacaagggcttatatggttcccttggtgggcagggatgggacaaaagcaaaagcagttgcagtgtgtcatgcaaatacaatggaatggaaccccaatcatttggcctttcaactgctcaaagtcaagccgggaactgctcccatctgccacttccttcctgaggaccatgtcgtctgggttgcaaagtagagatgggcaattaatgaataaataaataaactcatctgagttcttcggtaatgttatgaattggaatatcatcgtgaggggcacttgatgttaatttggaatttttatgcagtgtatatatgctagctgcaaccctcactctttgtactatctattaggtatgtaagcgtgccagatattgccttctcttagttaaatactaatgctacttattctggtgtgcttcgccaatttattc

SEQ ID NO: 125 - protein, 319 aa, Vitis vinifera
MEFYLLPILAFLSLTLTAGDADLPSEVYWSSVLPNTPMPQAVKNSLRPDLLEDQSTPVEIGKGTSMGFSKEGGAMNMYAGVKPAKAAMPFSYHYAATKDQLHAYPNVAIFFLEKDMHPGMKLTLHFTKTTNATFLPHQVANSLPFSSDKLAEILDQLSIKPESVEAETIKNTIEECEDPGIKGEEKYCATSLESMIDFSTSKLGNKGVKAVSTEAENKSQMKYRIAAGLEKMGGDFSVVCHKMNYPYAVFYCHKIQATRAYMVPLVGRDGTKAKAVAVCHANTMEWNPNHLAFQLLKVKPGTAPICHFLPEDHVVWVAK

SEQ ID NO: 126 - DNA, 1011 bp, Bruguiera gymnorhiza
atggagtctcgtatcccatatatcctaggtttgctcatgcttgcgctggtggcaagtggcgcggccttggcccctgaagcttattggaactctgttttgcctaacacgcccatgccaaaggctatcaaagatcttctacacccagatatgttggaggacaaaggcacttcagtggctgtaggaaagggcggtgtaaatgttgatgctggaaaaggaaagcctggtggtggcacccatgttggtgtgggaggaaaaggtgttggtgttgacgctggaaagcctggcggtggcggcaccaattttggctttgacagagctgtctcaaacatttatgctgcatctgaagatcagatccacgacaaccccaacttagctctctttttcttgcaaaaagacttgaaaccgggcaaatccatgaacttggatttccccgaaagctcaaacacggcaactttcttgcctcgccacgtcgcagattccataccattttcatcaaacaagttgcaagatgctttccgcgaattttcggtgaagcccggatctctggaagctgaaataatggagaatacagtcaaggaatgtgaaaatcctggaattgaaggagaagagaaatactgtgcaacttcactggagtcgatggttgactttagcacttccaaacttggaaaggacattcaggcaatctctacagaggttgagaagcaaacgggcaggcagaaatatacaatcgccggagtaaagaagatagcaggtgacaaatgcgtggtttgccacaagcagaattacccttatgctgtattctactgccattcaattcaatccacaagggcttacctggttcaattaaagggtgttgacagaacaaggcttcaagcagtagcaatctgccacacgaacacatcagcatggaacccaaaacatccggctttccaagtgctagcggtcaagcccggaactgtgcctatttgccatttccttccccagagccatgttgtttgggttcccaagtag

SEQ ID NO: 127 - protein, 336 aa, Bruguiera gymnorhiza
MESRIPYILGLLMLALVASGAALAPEAYWNSVLPNTPMPKAIKDLLHPDMLEDKGTSVAVGKGGVNVDAGKGKPGGGTHVGVGGKGVGVDAGKPGGGGTNFGFDRAVSNIYAASEDQIHDNPNLALFFLQKDLKPGKSMNLDFPESSNTATFLPRHVADSIPFSSNKLQDAFREFSVKPGSLEAEIMENTVKECENPGIEGEEKYCATSLESMVDFSTSKLGKDIQAISTEVEKQTGRQKYTIAGVKKIAGDKCVVCHKQNYPYAVFYCHSIQSTRAYLVQLKGVDRTRLQAVAICHTNTSAWNPKHPAFQVLAVKPGTVPICHFLPQSHVVWVPK

SEQ ID NO: 128 - DNA, 924 bp, Medicago trunactula
atgaagtttgcttacatatccatctttatatctctcagtcttgcactggtggcaacccatgctaccttaccacctgaattgtattggaagtccaaacttcccacaactcaaattccaaaagccatcacagatatccttcacccaatggatgatggaaaaatcagtgttgatggaaaaatcagtgttaatggaaaaacaaggatagtatatgatgcagctccaatttatttctatgaaaatgatgcaaatgaagcagaattacatgataatcgaaatttggctatgttcttattggaaaaggacttgcatcatggtacaaaattcaacatacaattcacaaagacctcagaccatggaccgacattcttgcctggtgacgttgcgaattccattcccttttcatcaaacaaattggaaaacatccttaactacttctccatcaagcaaggatcgacggaatctgaaattgtgaagaacacaataagtgaatgtgaagcatatggtatcaaaggagaggaaaagctttgtgtgacatcattggaatctatgattgatttcactactttgaagcttggaaacaatgttgacactgtttcaacagaagtaaatggagaaagtggtttacaacaatatgtaatagcaaacggagtgaagaaaatgggagagaacaatttggttgtgtgccacaaacggaattacccttatgcagttttttactgtcacaaaacagatgcaactaaagtttactctgtgcctttggaaggtgctgatggaagtagagttaaagctgttgctatttgccactctgatacttcacaatggagccttaaacatttggcttttcaagtgctcaaagttcaacaaggaacttttccagtttgccacatcctacaacagggtcaagttgtttggttttccaagtaa

SEQ ID NO: 129 - protein, 307 aa, Medicago trunactula
MKFAYISIFISLSLALVATHATLPPELYWKSKLPTTQIPKAITDILHPMDDGKISVDGKISVNGKTRIVYDAAPIYFYENDANEAELHDNRNLAMFLLEKDLHHGTKFNIQFTKTSDHGPTFLPGDVANSIPFSSNKLENILNYFSIKQGSTESEIVKNTISECEAYGIKGEEKLCVTSLESMIDFTTLKLGNNVDTVSTEVNGESGLQQYVIANGVKKMGENNLVVCHKRNYPYAVFYCHKTDATKVYSVPLEGADGSRVKAVAICHSDTSQWSLKHLAFQVLKVQQGTFPVCHILQQGQVVWFSK

SEQ ID NO: 130 - DNA, 1131 bp, Gossypium arboreum
atgaaggttctctccccaattcttgcttgcctagcgcttgctgtggtggcaagtcatgctgctctctcacccgagcaatattggagctataagctgccaaatactccaatgccaaaggctgtcaaagaaattctacatccagaactgatggaggagaaaagtacctctgtaaatgtaggaggtggtggtgtaaacgtcaacacaggaaaagggaagccagcgggtggcactcatgtgaacgttgggcgcaaaggagttggagtgaacacgggaaagccagggggtggcactcatgtgaatgttggaggcaaaggagttggggtgaacactggaaagccaggaggtggcacccatgtgaacgttggaggcaaaggtggaggagtatctgtacacaccggacacaagggaaagccagtaaatgttaatgtgagtccgtttctttaccaatatgcagccagtgaaactcaaatccatgacgatccgaatgtggctcttttctttctggaaaaggatttacaccccggggcaacaatgagcctgcatttcactgaaaatacagagaaatccgctttcttaccttatcaaactgcccaaaaaataccgttttcatctaacgagttgccagaaattttcaacaagttttcagtgaaacctggatcagtgaaggcagagatgatgaagaacacaattaaggagtgcgaacagccagcgattgaaggagaggaaaaatattgtgcaacctcactggagtcaatgattgactacagcatttccaaactagggaaagttgatcaggcagtctcaacagaagtggaaaaacaaaccccaacgcacaagtatacaataacagctggagtgcagaagatgacaaatgacaaagctgtagtgtgccacaagcagaattatgcatatgctgtcttctattgccataaatcagaaacaacaagggcttacatggttcctttagagggtgctgacggaacaaaagccaaagcagtagcagtctgtcacacagatacatcagcatggaacccaaagcatttggcttttcaagtcctaaaagttgagccaggaaccattcctgtctgccatttccttcctcgggatcacattgtttgggtccccaagtaa

SEQ ID NO: 131 - protein, 376 aa, Gossypium arboreum
MKVLSPILACLALAVVASHAALSPEQYWSYKLPNTPMPKAVKEILHPELMEEKSTSVNVGGGGVNVNTGKGKPAGGTHVNVGRKGVGVNTGKPGGGTHVNVGGKGVGVNTGKPGGGTHVNVGGKGGGVSVHTGHKGKPVNVNVSPFLYQYAASETQIHDDPNVALFFLEKDLHPGATMSLHFTENTEKSAFLPYQTAQKIPFSSNELPEIFNKFSVKPGSVKAEMMKNTIKECEQPAIEGEEKYCATSLESMIDYSISKLGKVDQAVSTEVEKQTPTHKYTITAGVQKMTNDKAVVCHKQNYAYAVFYCHKSETTRAYMVPLEGADGTKAKAVAVCHTDTSAWNPKHLAFQVLKVEPGTIPVCHFLPRDHIVWVPK

SEQ ID NO: 132 - DNA, 1008 bp, Gossypium arboreum
atgaaggttctctccccaattcttgcttgcctagcgcttgctgtggtggtaagccatgctgctctctcacctgagcaatattggagctataagctgccaaatactccaatgccaaaggctgtcaaagaaattctacatccagaactgatggaggagaaaagtacctctgtaaatgtaggaggtggtggtgtaaacgtcaatacaggaaaagggaagcctgggggtgacacccatgtgaacgttggaggcaaaggagttggagtgaacacgggaaagccagggggtggcactcatgtgaatgatccagacccttttaattacctatatgcagccagtgaaactcaaatccatgaggacccgaatgtggctcttttctttctggaaaaggatatgcaccccggggcgacaatgagcctgcatttcattgaaaatacagagaaatcagctttcttaccttatcaaactgccccaaaaaatacgttttcatctgacaagttgccagaaattttcaacaagttttcagtgaaacctggttcagtgaaggcagagatgatgaagaacacaattaaggagtgcgaacagccagcgattgaaggagaggaaaaatattgtgcaacctcactggagtcaatgattgactatagcatttccaaactagggaaagttgatcaggcagtctcaacagaagtggaaaaacaaaccccaatgcaaaagtatacaatagcagctggagtgcagaagatgacagatgacaaagctgtagtgtgccacaagcagaattatgcatatgctgtcttctattgccataaatcagaaacaacaagggcttacatggttcctttagagggtgctggcggaacaaaagccaaagcactagcagtctgccacacagatacatcagcatggaacccaaagcatttggcttttcaattcctaaaagttgaaccaggaaccattcctgtctgtcatttccttcctcgggatcacattgtttgggtccctaagtaa

SEQ ID NO: 133 - protein, 335 aa, Gossypium arboreum
MKVLSPILACLALAVVVSHAALSPEQYWSYKLPNTPMPKAVKEILHPELMEEKSTSVNVGGGGVNVNTGKGKPGGDTHVNVGGKGVGVNTGKPGGGTHVNDPDPFNYLYAASETQIHEDPNVALFFLEKDMHPGATMSLHFIENTEKSAFLPYQTAPKNTFSSDKLPEIFNKFSVKPGSVKAEMMKNTIKECEQPAIEGEEKYCATSLESMIDYSISKLGKVDQAVSTEVEKQTPMQKYTIAAGVQKMTDDKAVVCHKQNYAYAVFYCHKSETTRAYMVPLEGAGGTKAKALAVCHTDTSAWNPKHLAFQFLKVEPGTIPVCHFLPRDHIVWVPK

SEQ ID NO: 134 - DNA, 1008 bp, Gossypium hirsutum
atgaaggttctctccccaattcttgcttgcctagcgcttgctgtggtggtaagccatgctgctctctcacctgagcaatattggagctataagctgccaaatactccaatgccaaaggctgtcaaagaaattctacatccagaactgatggaggagaaaagcacctctgtaaatgtaggaggtggtggtgtaaacgtcaatacaggaaaagggaagcctgggggtgacacccatgtgaacgttggaggcaaaggagttggagtgaacacgggaaagccagggggtggcactcatgtgaatgttggagacccttttaattacctatatgcagccagtgaaactcaaatccatgaagacccgaatgtggctcttttctttctggaaaaggatatgcaccccggggcaacaatgagcctgcatttcactgaaaatacagagaaatcagctttcttaccttatcaaactgcccaaaaaataccgttttcatctgacaagttgccagaaattttcaacaagttttcagtgaaacctggatcactgaaggcagagatgatgaagaacacaattaaggagtgcgaacagccagcgattgaaggagaggaaaaatattgtgcaacctcactggagtcaatgattgactatagcatttccaaactagggaaagttgatcaggcagtctcaacagaagtggaaaaacaaaccccaatgcaaaagtatacaatagcagctggagtgcagaagatgacagatgacaaagctgtagtgtgccacaagcagaattatgcatatgctgtcttctattgccataaatcagaaacaacaagggcttacatggttcctttagagggtgctgacggaacaaaagccaaagcagtagcagtctgccacacagatacatcagcatggaaccctaagcatttggcttttcaagtcctaaaagttgaaccaggaaccattcctgtctgccatttccttcctcgggatcacattgtttgggtccctaagtaa

SEQ ID NO: 135 - protein, 335 aa, Gossypium hirsutum
MKVLSPILACLALAVVVSHAALSPEQYWSYKLPNTPMPKAVKEILHPELMEEKSTSVNVGGGGVNVNTGKGKPGGDTHVNVGGKGVGVNTGKPGGGTHVNVGDPFNYLYAASETQIHEDPNVALFFLEKDMHPGATMSLHFTENTEKSAFLPYQTAQKIPFSSDKLPEIFNKFSVKPGSLKAEMMKNTIKECEQPAIEGEEKYCATSLESMIDYSISKLGKVDQAVSTEVEKQTPMQKYTIAAGVQKMTDDKAVVCHKQNYAYAVFYCHKSETTRAYMVPLEGADGTKAKAVAVCHTDTSAWNPKHLAFQVLKVEPGTIPVCHFLPRDHIVWVPK

SEQ ID NO: 136 - DNA, 1008 bp, Gossypium hirsutum
atgaaggttctctccccaattcttgcttgcctagcgcttgctgtggtggtaagccatgctgttctctcacctgagcaatattggagctataagctgccaaatattccaatgccaaaggctgtcaaagaaattctacatccagaactgatggaggagaaaagtacctctgtaaatgtaggaggtggtggtgtaaacgtcaatacaggaaaagggaagcctgggggtgacacccatgtgaacgttggaggcaaaggagttggagtgaacacgggaaagccagggggtggcactcatgtgaatgatccagacccttttaattacctatatgcagccagtgaaactcaaatccatgaggacccgaatgtggctcttttctttctggaaaaggatatgcaccccggggcgacaatgagcctgcatttcattgaaaatacagagaaatcagctttcttaccttatcaaactgcccaaaaaataccgttttcatctgacaagttgccagaaattttcaacaagttttcagtgaaacctggatcagtgaaggcagagatgatgaagaacacaattaaggagtgcgaacagccagcgattgaaggagaggaaaaatattgtgcaacctcactggagtcaatgattgactatagcatttccaaactagggaaagttgatcaggcagtctcaacagaagtggaaaaacaaaccccaatgcaaaagtatacaatagcagctggagtgcagaagatgacagatgacaaagctgtagtgtgccacaagcagaattatgcatatgctgtcttctattgccataaatcagaaacaacaagggcttacatggttcctttagagggtgctggcggaacaaaagcccaagcactagcagtctgccacacagatacatcagcatggaacccaaagcatttggcttttcaattcctaaaagttgaaccaggaaccattcctgtctgtcatttccttcctcgggatcacattgtttgggtccctaagtaa

SEQ ID NO: 137 - protein, 335 aa, Gossypium hirsutum
MKVLSPILACLALAVVVSHAVLSPEQYWSYKLPNIPMPKAVKEILHPELMEEKSTSVNVGGGGVNVNTGKGKPGGDTHVNVGGKGVGVNTGKPGGGTHVNDPDPFNYLYAASETQIHEDPNVALFFLEKDMHPGATMSLHFIENTEKSAFLPYQTAQKIPFSSDKLPEIFNKFSVKPGSVKAEMMKNTIKECEQPAIEGEEKYCATSLESMIDYSISKLGKVDQAVSTEVEKQTPMQKYTIAAGVQKMTDDKAVVCHKQNYAYAVFYCHKSETTRAYMVPLEGAGGTKAQALAVCHTDTSAWNPKHLAFQFLKVEPGTIPVCHFLPRDHIVWVPK

SEQ ID NO: 138 - DNA, 1104 bp, Glycine max
atggtgtttcctctcctatctatctttgctttactcaatcttgcagtggtggcaacccatgcagaaaccttgccccctgaagtttactggaagtcgaagcttcccaccactccaatgccgaaagccattacagatatccttcacccagatttggcagaagacaaaagcacctctgtggccgtaggaaaggggggcgtaaacgttaacgcagggaaaacaaagccaggaggcacatcagtgaacgtaggaaaaggaggagtgaacgtgaacacagggaaaggaaagcccaacaaaggcacatcagtgaacgtaggcaaaggtggagtgaacgtaaacacaggaccaaagaagggtaagccagtgcacgttggagtgggcccacattctccatttgattacaattacgcagccagcgaaacccagtggcacgatgaccccaacgtggcactcttcttcttggaaaaggacttgcactacggaacaaagttgaaccttcacttcactcgctacttcacctcaagtgttgatgcctcgttcttgcctcgatcagttgctgattccatacccttttcatcaaacaaggtgaatgaagtgttaaacaagttctccatcaaggaagggtcagatgaggctcaaactgtgaagaacaccatcagtgagtgtgaagtgcctggcattaagggagaggaaaagcgttgcgtgacttcacttgagtccatggttgatttcgccactaccaagctcgggagcaaggatgttgatgctgtttccacagaagtgacaaaaaaagataatgagttacaacagtatacaatggcaccaggggttaagaggttgggtgaggacaaggctagtgttgtgtgtcacaaggagaattacccttatgcagtgttttattgccacaaatcagaaaacacaaaagcctattctgtcccattggagggtgctgatggaagcagggtcaaagcagttgcagtgtgccatactgacacatcaaagtggaatcccaagcatttggcgtttcaagtgcttaaggttcatccaggaactgttcctatctgccacttcctgcctcaggatcatgttgtctttgttcccaagtag

SEQ ID NO: 139 - protein, 367 aa, Glycine max
MVFPLLSIFALLNLAVVATHAETLPPEVYWKSKLPTTPMPKAITDILHPDLAEDKSTSVAVGKGGVNVNAGKTKPGGTSVNVGKGGVNVNTGKGKPNKGTSVNVGKGGVNVNTGPKKGKPVHVGVGPHSPFDYNYAASETQWHDDPNVALFFLEKDLHYGTKLNLHFTRYFTSSVDASFLPRSVADSIPFSSNKVNEVLNKFSIKEGSDEAQTVKNTISECEVPGIKGEEKRCVTSLESMVDFATTKLGSKDVDAVSTEVTKKDNELQQYTMAPGVKRLGEDKASVVCHKENYPYAVFYCHKSENTKAYSVPLEGADGSRVKAVAVCHTDTSKWNPKHLAFQVLKVHPGTVPICHFLPQDHVVFVPK

SEQ ID NO: 140 - protein, 21 aa, Artificial sequence
  motif 9
  VARIANT (1)..(1): / replace = "Glu"
  VARIANT (2)..(2): / replace = "Lys"
  VARIANT (3)..(3): / replace = "Lys"
  VARIANT (13)..(13): / replace = "Ile"
  VARIANT (14)..(14): / replace = "Glu"
  VARIANT (15)..(15): / replace = "Phe"
  VARIANT (16)..(16): / replace = "Val" / replace = "Ala"
  VARIANT (17)..(17): / replace = "Ala"
  VARIANT (19)..(19): / replace = "Ser"
HEHYCATSLESMVDLSTSKLG

SEQ ID NO: 141 - protein, 21 aa, Artificial sequence
  motif 10
  VARIANT (2)..(2): / replace = "Ala"
  VARIANT (5)..(5): / replace = "Lys"
  VARIANT (6)..(6): / replace = "Glu" / replace = "Met"
  VARIANT (7)..(7): / replace = "Pro"
  VARIANT (9)..(9): / replace = "Pro"
  VARIANT (14)..(14): / replace = "Gly"
  VARIANT (15)..(15): / replace = "Cys"
  VARIANT (17)..(17): / replace = "Gly" / replace = "Thr"
  VARIANT (18)..(18): / replace = "Ile" / replace = "Ser"
  VARIANT (19)..(19): / replace = "Glu"
  VARIANT (20)..(20): / replace = "Gly" / replace = "Thr"
  VARIANT (21)..(21): / replace = "Thr"
VVCHRQNYAYAVFYVHKTKAA

SEQ ID NO: 142 - protein, 29 aa, Artificial sequence
  motif 11
  VARIANT (1)..(1): / replace = "Pro"
  VARIANT (2)..(2): / replace = "Lys"
  VARIANT (3)..(3): / replace = "His"
  VARIANT (4)..(4): / replace = "Leu"
  VARIANT (6)..(6): / replace = "Phe"
  VARIANT (7)..(7): / replace = "Lys"
  VARIANT (8)..(8): / replace = "Val"
  VARIANT (10)..(10): / replace = "Gly"
  VARIANT (12)..(12): / replace = "Lys"
  VARIANT (15)..(15): / replace = "Lys" / replace = "Ser"
  VARIANT (17)..(17): / replace = "Ala"
  VARIANT (26)..(26): / replace = "His"
  VARIANT (27)..(27): / replace = "Met" / replace = "Ile"
  VARIANT (28)..(28): / replace = "Leu"
AVAEAYQRLKVAPGTVPVCHFLPQDDVVW

SEQ ID NO: 143 - protein, 29 aa, Artificial sequence
  motif 12
  VARIANT (1)..(1): / replace = "Leu"
  VARIANT (5)..(5): / replace = "Gln"
  VARIANT (6)..(6): / replace = "Arg"
  VARIANT (10)..(10): / replace = "Val"
  VARIANT (13)..(13): / replace = "Ala"
  VARIANT (15)..(15): / replace = "Asp" / replace = "Asn"
  VARIANT (21)..(21): / replace = "Phe"
  VARIANT (22)..(22): / replace = "Ser"
  VARIANT (23)..(23): / replace = "Gln" / replace = "Arg"
  VARIANT (24)..(24): / replace = "Leu"
  VARIANT (26)..(26): / replace = "Ile"
  VARIANT (27)..(27): / replace = "Lys"
  VARIANT (28)..(28): / replace = "Ala"
FLPRGVADSIPFSSEKLPEILNKFSVPPG

SEQ ID NO: 144 - protein, 32 aa, Artificial sequence
  motif 13
  VARIANT (1)..(1): / replace = "Leu"
  VARIANT (2)..(2): / replace = "Ser" / replace = "Thr"
  VARIANT (3)..(3): / replace = "Pro"
  VARIANT (5)..(5): / replace = "Gln"
  VARIANT (8)..(8): / replace = "Ser"
  VARIANT (9)..(9): / replace = "Ser"
  VARIANT (10)..(10): / replace = "Lys"
  VARIANT (13)..(13): / replace = "Thr"
  VARIANT (14)..(14): / replace = "Ser"
  VARIANT (16)..(16): / replace = "Ile"
  VARIANT (18)..(18): / replace = "Gly"
  VARIANT (19)..(19): / replace = "Ser"
  VARIANT (20)..(20): / replace = "Val"
  VARIANT (21)..(21): / replace = "Arg"
  VARIANT (23)..(23): / replace = "Ile"
  VARIANT (24)..(24): / replace = "Leu"
  VARIANT (25)..(25): / replace = "His"
  VARIANT (27)..(27): / replace = "Ala"
  VARIANT (28)..(28): / replace = "Leu"
  VARIANT (30)..(30): / replace = "Glu"
  VARIANT (31)..(31): / replace = "Glu"
  VARIANT (32)..(32): / replace = "Ser"
SPAEMYWKIALPNTPMPKAIKDLISPDSSAAK

SEQ ID NO: 145 - protein, 29 aa, Artificial sequence
  motif 14
  VARIANT (1)..(1): / replace = "Glu"
  VARIANT (2)..(2): / replace = "Thr"
  VARIANT (3)..(3): / replace = "Gln"
  VARIANT (4)..(4): / replace = "Asp" / replace = "Ile"
  VARIANT (5)..(5): / replace = "His"
  VARIANT (6)..(6): / replace = "Glu"
  VARIANT (8)..(8): / replace = "Pro"
  VARIANT (9)..(9): / replace = "Val" / replace = "Thr"
  VARIANT (10)..(10): / replace = "Val"
  VARIANT (11)..(11): / replace = "Ala"
  VARIANT (12)..(12): / replace = "Leu"
  VARIANT (17)..(17): / replace = "Glu"
  VARIANT (19)..(19): / replace = "Met"
  VARIANT (20)..(20): / replace = "Phe" / replace = "Arg"
  VARIANT (23)..(23): / replace = "Ser" / replace = "Ala"
  VARIANT (24)..(24): / replace = "Thr"
  VARIANT (26)..(26): / replace = "Thr"
ASKLKDDTNGSVFFLEKDLHPGKKMNLHF

SEQ ID NO: 146 - protein, 15 aa, Artificial sequence
  motif 15
  VARIANT (4)..(4): / replace = "Met" / replace = "Lys"
  VARIANT (5)..(5): / replace = "Val"
  VARIANT (6)..(6): / replace = "Glu"
  VARIANT (8)..(8): / replace = "Leu"
  VARIANT (10)..(10): / replace = "Val"
  VARIANT (13)..(13): / replace = "Gly" / replace = "Ala"
  VARIANT (15)..(15): / replace = "Val"
DGTRAKAVAACHTDT

SEQ ID NO: 147 - protein, 15 aa, Artificial sequence
  motif 16
  VARIANT (2)..(2): / replace = "Val"
  VARIANT (3)..(3): / replace = "Thr" / replace = "Lys"
  VARIANT (5)..(5): / replace = "Glu"
  VARIANT (6)..(6): / replace = "Met"
  VARIANT (7)..(7): / replace = "Val"
  VARIANT (8)..(8): / replace = "Lys"
  VARIANT (9)..(9): / replace = "Asn"
  VARIANT (10)..(10): / replace = "Thr"
  VARIANT (11)..(11): / replace = "Leu"
  VARIANT (12)..(12): / replace = "Lys"
  VARIANT (13)..(13): / replace = "Glu"
SPEADAMRSLIAVCE

SEQ ID NO: 148 - protein, 15 aa, Artificial sequence
  motif 17
  VARIANT (1)..(1): / replace = "Gly"
  VARIANT (2)..(2): / replace = "Gln"
  VARIANT (3)..(3): / replace = "Ser"
  VARIANT (5)..(5): / replace = "Arg"
  VARIANT (7)..(7): / replace = "Lys"
  VARIANT (9)..(9): / replace = "Thr"
  VARIANT (10)..(10): / replace = "Val"
  VARIANT (11)..(11): / replace = "Glu" / replace = "Thr"
  VARIANT (13)..(13): / replace = "Val" / replace = "Ala"
  VARIANT (14)..(14): / replace = "Val"
  VARIANT (15)..(15): / replace = "Pro" / replace = "Arg"
KPTPMQAYRIAAGRK

SEQ ID NO: 149 - protein, 8 aa, Artificial sequence
  motif 18
  VARIANT (3)..(3): / replace = "Thr"
  VARIANT (5)..(5): / replace = "Pro"
  VARIANT (7)..(7): / replace = "Ala"
AYMVTLEG

SEQ ID NO: 150 - protein, 33 aa, Artificial sequence
  motif 19
  VARIANT (1)..(1): / replace = "Gly"
  VARIANT (2)..(2): / replace = "Glu"
  VARIANT (3)..(3): / replace = "Ala"
  VARIANT (4)..(4): / replace = "Lys"
  VARIANT (5)..(5): / replace = "Tyr"
  VARIANT (15)..(15): / replace = "Asp"
  VARIANT (16)..(16): / replace = "Phe"
  VARIANT (17)..(17): / replace = "Val"
  VARIANT (18)..(18): / replace = "Thr"
  VARIANT (24)..(24): / replace = "Ser"
  VARIANT (25)..(25): / replace = "His"
  VARIANT (26)..(26): / replace = "Ile"
  VARIANT (27)..(27): / replace = "His"
  VARIANT (29)..(29): / replace = "Ala"
  VARIANT (32)..(32): / replace = "Val"
KHKHACATSLESMVELAASSLGTRDVRAVSTEV

SEQ ID NO: 151 - protein, 29 aa, Artificial sequence
  motif 20
  VARIANT (1)..(1): / replace = "Ala"
  VARIANT (2)..(2): / replace = "Val"
  VARIANT (4)..(4): / replace = "Tyr"
  VARIANT (5)..(5): / replace = "Gln"
  VARIANT (6)..(6): / replace = "Arg"
  VARIANT (8)..(8): / replace = "Lys"
  VARIANT (10)..(10): / replace = "Ala"
  VARIANT (13)..(13): / replace = "Lys" / replace = "Ser"
  VARIANT (15)..(15): / replace = "Pro"
  VARIANT (20)..(20): / replace = "Met"
  VARIANT (24)..(24): / replace = "Asp"
  VARIANT (25)..(25): / replace = "Met"
  VARIANT (26)..(26): / replace = "Leu"
  VARIANT (28)..(28): / replace = "Thr"
  VARIANT (29)..(29): / replace = "Ser"
HEAFKVLGVKPGTVAVCHFLPQDHVVWVR

SEQ ID NO: 152 - protein, 29 aa, Artificial sequence
  motif 21
  VARIANT (1)..(1): / replace = "Lys"
  VARIANT (2)..(2): / replace = "Leu"
  VARIANT (7)..(7): / replace = "Glu"
  VARIANT (9)..(9): / replace = "Glu"
  VARIANT (10)..(10): / replace = "Ala"
  VARIANT (11)..(11): / replace = "Ile"
  VARIANT (14)..(14): / replace = "Ser"
  VARIANT (19)..(19): / replace = "Ser"
  VARIANT (24)..(24): / replace = "Arg"
  VARIANT (25)..(25): / replace = "Leu"
  VARIANT (26)..(26): / replace = "Gly"
  VARIANT (27)..(27): / replace = "Ile"
  VARIANT (29)..(29): / replace = "Pro"
AFLPRGRADSVPFASEKLPEILSQFSVPA

SEQ ID NO: 153 - protein, 29 aa, Artificial sequence
  motif 22
  VARIANT (1)..(1): / replace = "His"
  VARIANT (10)..(10): / replace = "Leu"
  VARIANT (13)..(13): / replace = "Leu"
  VARIANT (14)..(14): / replace = "Val"
  VARIANT (23)..(23): / replace = "Ile"
  VARIANT (24)..(24): / replace = "Arg"
KYCATSLESMVEFAASSLGTRDVHAVSTE

SEQ ID NO: 154 - protein, 29 aa, Artificial sequence
  motif 23
  VARIANT (1)..(1): / replace = "Ala"
  VARIANT (5)..(5): / replace = "Ser"
  VARIANT (7)..(7): / replace = "Pro"
  VARIANT (13)..(13): / replace = "Thr"
  VARIANT (16)..(16): / replace = "Arg" / replace = "Asp"
  VARIANT (18)..(18): / replace = "Pro"
  VARIANT (20)..(20): / replace = "Pro"
  VARIANT (24)..(24): / replace = "Tyr"
  VARIANT (26)..(26): / replace = "Cys"
  VARIANT (28)..(28): / replace = "Gly"
  VARIANT (29)..(29): / replace = "Thr"
VRPVPVSGGDMVACHGMAYAYAVFGVHTI

SEQ ID NO: 155 - protein, 29 aa, Artificial sequence
  motif 24
  VARIANT (5)..(5): / replace = "Thr"
  VARIANT (7)..(7): / replace = "Asn"
  VARIANT (16)..(16): / replace = "Arg"
  VARIANT (21)..(21): / replace = "Ile" / replace = "Leu"
  VARIANT (26)..(26): / replace = "Pro"
  VARIANT (27)..(27): / replace = "Pro"
KEDTVGSVFFLEKDLFPGSKMTLHFTRAT

SEQ ID NO: 156 - DNA, 2194 bp, Oryza sativa; identical to SEQ ID NO: 91

SEQ ID NO: 157 - DNA, 56 bp, Artificial sequence
  primer: prm13652
ggggacaagtttgtacaaaaaagcaggcttaaacaatggctaggtctctcgctgct

SEQ ID NO: 158 - DNA, 50 bp, Artificial sequence
  primer: prm13653
ggggaccactttgtacaagaaagctgggtcgcaggtagctgcttcattca

SEQ ID NO: 159 - DNA, 549 bp, Medicago truncatula
atggacggtggaagaggaaaaggagagagaaagagaaacggtggtggtgttggtgttgatggagagagaagatacaaaggaattcgtatgagaaagtggggaaaatgggtagctgaaattcgagaaccaaacaaacgttctcgaatttggttaggttcctattctacccctatcgccgccgcaagagcttacgacaccgccgttttctacctccggggaccatcagctcgtctcaatttcccagagctactcaacggtgaaaacaacgcggttgttggtggtggtgatatgtcggcggctactattcgaaagaaagctactgaagttggtgctagagttgatgctcttcaagcagatgttaatcatcatagtcatagccatagtcataatcataatcatcatcaccttcagcataaccggaaccagcatcatcgtgttatgccggttccggagttgcttgaaggtgatggttctggtgattttgctgagagagttgatttgaataagattcctgaaccagagagttctgatgagtgggatgttaattga

SEQ ID NO: 160 - protein, 182 aa, Medicago truncatula
MDGGRGKGERKRNGGGVGVDGERRYKGIRMRKWGKWVAEIREPNKRSRIWLGSYSTPIAAARAYDTAVFYLRGPSARLNFPELLNGENNAVVGGGDMSAATIRKKATEVGARVDALQADVNHHSHSHSHNHNHHHLQHNRNQHHRVMPVPELLEGDGSGDFAERVDLNKIPEPESSDEWDVN

SEQ ID NO: 161 - DNA, 519 bp, Medicago truncatula
atggtacagcaaagcgaatcaactaggaggatcatggaagaagaaagagattgttgttcaacaataataagaaacatagaaagcaacaacaaacctcaagagaaacacaacaaacaacaactagagaaaccatacagaggaataaggaagagaaagtggggtaagtgggtagcagaaataagagaaccaaataaaagatcaagaatatggttaggttcttacatcactccggtagctgctgctcgtgcctacgacaccgccgtattctatttaagaggtcctacggctcgtcttaatttccccgaattattgctcgaagacgacgaagaaaacaaggacggttctattcagcaaggtaacatgtctgctgatttaatacgcaaaaaagctaccaaagtcggtgctagagttgatgctcttcaagcggctcttcaagcttcttctcgttctgattccgatcaattcaacgctgatgtgaaacctgatttgaacaagtttccagaacctgaagattattaa

SEQ ID NO: 162 - protein, 172 aa, Medicago truncatula
MVQQSESTRRIMEEERDCCSTIIRNIESNNKPQEKHNKQQLEKPYRGIRKRKWGKWVAEIREPNKRSRIWLGSYITPVAAARAYDTAVFYLRGPTARLNFPELLLEDDEENKDGSIQQGNMSADLIRKKATKVGARVDALQAALQASSRSDSDQFNADVKPDLNKFPEPEDY

SEQ ID NO: 163 - DNA, 453 bp, Arabidopsis thaliana
atggtgattcaatacaaacgaaaacaagagtttcctatggtgaaagaaggaatggtcatgaccgagaagccaaagaggaatctcataagctctaatgagaagcgatacaaaggaataaggatgaggaagtggggcaagtgggtggctgagataagagagcctaataaacgatcacggatctggcttggttcatacaaaaccgccgttgccgcggcacgggcctacgataccgctgtgttttacttacgtggtccttcggcgagactcaatttccctgaagaggtctttaaggatggaaacggcggtgaaggcttaggaggagatatgtctccgacgttgatacggaagaaggcggctgaggtgggagctagagtcgacgcagagttgcggttagagaataggatggttgagaacttagacatgaataagttgccggaggcatatggattgtaa

SEQ ID NO: 164 - protein, 150 aa, Arabidopsis thaliana
MVIQYKRKQEFPMVKEGMVMTEKPKRNLISSNEKRYKGIRMRKWGKWVAEIREPNKRSRIWLGSYKTAVAAARAYDTAVFYLRGPSARLNFPEEVFKDGNGGEGLGGDMSPTLIRKKAAEVGARVDAELRLENRMVENLDMNKLPEAYGL

SEQ ID NO: 165 - DNA, 720 bp, Triticum aestivum
atgcagcagggcgagtaccgctcgtcgtcttccagcgagggctccgcggggtcggcgtcggctgcggcggcggcgatggcgcctctggcggctgcggtcgcggcggtggcggccaaggaggagcacaacgtgacggtggccgtggcgccgcccatgcccatggcgatggcgatgccgctgcagcagcagcagccgcggaagcagtaccgcggcgtgcgcatgcgcaagtggggcaagtgggtggcggagatccgcgagccgcacaagcggacgcgcatctggctggggtcctacgccacccccgtcgccgccgcgcgcgcctacgacacggccgtcttctacctgcgcggcaggtcggcgcgcctcaacttccccgacgagatctccgcgctggcgctgtcgtcgcccgaggccgccgccgaggccggaggggaggagccgggcgacggcggcggcgcgctgtcggccgcgtcgatccggaagaaggccatcgaggtcgggtcccgcgtggacgcgctccagaccggcatgaccaccatggtcgccgcgcccgcgcaccaccgggagcggcagcggctccaccaacaccaccaccacgcggagccgcacgctgaggagctgcaccgccacgtgaagcagcagcggacggcgtggaacgggcgcgccaagaacccggatctcaaccaggcgccgagcccggacacctccgacgccgagtga

SEQ ID NO: 166 - protein, 239 aa, Triticum aestivum
MQQGEYRSSSSSEGSAGSASAAAAAMAPLAAAVAAVAAKEEHNVTVAVAPPMPMAMAMPLQQQQPRKQYRGVRMRKWGKWVAEIREPHKRTRIWLGSYATPVAAARAYDTAVFYLRGRSARLNFPDEISALALSSPEAAAEAGGEEPGDGGGALSAASIRKKAIEVGSRVDALQTGMTTMVAAPAHHRERQRLHQHHHHAEPHAEELHRHVKQQRTAWNGRAKNPDLNQAPSPDTSDAE

SEQ ID NO: 167 - DNA, 732 bp, Triticum aestivum
atgcagcagggcgagtaccgctcgtcgtcttccagcgagggctccgcggggtcggctgctgcggctgcggcggccgcggccatggcgcccctggcggctgcggccgcggcggtggcggccaaggaggagcacaacgtgacggtggccgtggcgccgcccatgcccatggcgatggcgatgccgctgcagcagcagcagccgcggaagcagtaccgcggcgtgcgcatgcgcaagtggggcaagtgggtggcggagatccgcgagccgcacaagcgcacgcgcatctggctgggctcctacgccacccccgtcgccgccgcgcgcgcctacgacacggccgtcttctacctgcgcggccggtcggcgcgcctcaacttccccgacgagatctccgcgctggcgctgtcgtcgcccgaggccgccgaggccggcggaggggaggagccgggcggcggcggcggcgcgctgtcggccgcgtcgatccggaagaaggccatcgaggtcgggtcccgcgtggacgcgctgcagaccggcatgaccaccatggtcgccgcgcccgcgcaccaccgcgagcggcagcggctccaccaccaccaccaccacgcggagccgcacggcgaggagctgcaccgccacgtgaagcagcagcggacggcgtggaacgggcgcgccaagaacccggatctcaaccaggcgccgagcccggacacctccgacgccgaggccgagtga

SEQ ID NO: 168 - protein, 243 aa, Triticum aestivum
MQQGEYRSSSSSEGSAGSAAAAAAAAAMAPLAAAAAAVAAKEEHNVTVAVAPPMPMAMAMPLQQQQPRKQYRGVRMRKWGKWVAEIREPHKRTRIWLGSYATPVAAARAYDTAVFYLRGRSARLNFPDEISALALSSPEAAEAGGGEEPGGGGGALSAASIRKKAIEVGSRVDALQTGMTTMVAAPAHHRERQRLHHHHHHAEPHGEELHRHVKQQRTAWNGRAKNPDLNQAPSPDTSDAEAE

SEQ ID NO: 169 - DNA, 702 bp, Oryza sativum
atgcagggcgagtaccaccgctcctccagcgaggactcggctgcttctgctgctgctgctgcggcggcggcggctgcggctatggctcctctcgccgcggctgcggcggcggttgctgccaaggaggagcaggcggcggcggcggcggtgctgccgctgcagcagcagcagccgaggcggcagtaccgtggcgtgcggatgcggaagtggggcaagtgggtggcggagatccgggagccgcacaagcggacgcgcatctggctggggtcgtacgcgacgcccgtggcggcggcgcgcgcctacgacacggcggtgttctacctccgcgggcggtcggcgcggctcaacttccccgaggagatctcctcgctggcgtcgctgtccgagggcggcggcgcgagcgagccccgcgagcccgacggcggcacgctgtccgcggcctcgatccggaagaaggccatcgaggtcggctcccgcgtcgacgcgctccagaccggcatgatggtcgcgccgacgacccaccaccgcgagcggcagaagcaccaccaccaccaccaccaccaccacccgcacctgcagccgcacggcgaggagcaacaccaccaccacgagcagaagcaccagcggacggcgtggagcggccgcgccaagaacccggatctcaaccaggcgccaagcccggagaactccgacgccgagtag

SEQ ID NO: 170 - protein, 233 aa, Oryza sativum
MQGEYHRSSSEDSAASAAAAAAAAAAAMAPLAAAAAAVAAKEEQAAAAAVLPLQQQQPRRQYRGVRMRKWGKWVAEIREPHKRTRIWLGSYATPVAAARAYDTAVFYLRGRSARLNFPEEISSLASLSEGGGASEPREPDGGTLSAASIRKKAIEVGSRVDALQTGMMVAPTTHHRERQKHHHHHHHHHPHLQPHGEEQHHHHEQKHQRTAWSGRAKNPDLNQAPSPENSDAE

SEQ ID NO: 171 - DNA, 450 bp, Solanum lycopersicum
atgatggaaggagagaagagaaaacagaggcaacaccagcaagataagccatacagaggaatacggatgaggaagtggggtaaatgggtagctgaaattcgagaaccaaacaaacgctctcgaatttggcttggttcttattcttcccctgttgctgctgctcgtgcttacgataccgctgtattttacttgcgaggtccttcagctaggcttaatttccctgaatgtatagtggatgaccatgaaattcacgatctatcagctgcttctattaaaaagaaagctactgaggtaggtgctcgagttgatgctctgcaaactgcgattcacaattctactgttaattctgttgaatcaaactgtaattcgaattctaaatctacaaggatgatgatgaagcctgatttgaatgaatatcctagcccggaaagttgcgacgaagataactga

SEQ ID NO: 172 - protein, 149 aa, Solanum lycopersicum
MMEGEKRKQRQHQQDKPYRGIRMRKWGKWVAEIREPNKRSRIWLGSYSSPVAAARAYDTAVFYLRGPSARLNFPECIVDDHEIHDLSAASIKKKATEVGARVDALQTAIHNSTVNSVESNCNSNSKSTRMMMKPDLNEYPSPESCDEDN

SEQ ID NO: 173 - DNA, 489 bp, Brassica napus
atgctacaacacggagccgccgccatggaggccggagtagcagcagctgacatggccggcgtaaggaagagagaaagaccatacaaagggataaggatgagaaaatggggaaaatgggtggcggagattcgggagcccaacaaacgttcaaggctatggctcggctcttactctaccccagaggcggcggcgcgtgcatacgacacggcggttttctacctgagaggacctaccgcaacgctcaattttccggagcttataccgagcatcgagaaatcctcagtcgaggacatgtcggcggcagcgatcaggagaaaggcaacggaggtcggagctgaagtagacgcgtacgggatggcggtgatgaacagcaaacggcgccgcgtttttggtcagaagtgtgactatgttggcgggttattggagcgggttgacttgaacaagttaccttacccggaaaatcaggataatgatgtggtgggaaaataa

SEQ ID NO: 174 - protein, 162 aa, Brassica napus
MLQHGAAAMEAGVAAADMAGVRKRERPYKGIRMRKWGKWVAEIREPNKRSRLWLGSYSTPEAAARAYDTAVFYLRGPTATLNFPELIPSIEKSSVEDMSAAAIRRKATEVGAEVDAYGMAVMNSKRRRVFGQKCDYVGGLLERVDLNKLPYPENQDNDVVGK

SEQ ID NO: 175 - DNA, 462 bp, Helianthus annuus
atgggtgcacaacaccaccacaccacccaaaactcatcaacccgaaaaccccaaaatacgaaaccttaccgaggaattcgcatgcgaaagtggggcaaatgggttgcggagattcgtgagccgaacaagcgctcacgaatctggctgggttcatactcctcgcctgtggcggcggcgcgggcttacgacacggccgtgttttatttacgaggcccgtcggctcggcttaattttccggataaaattggggatgatgggtgcgggttgtgtgatttatctgcggcggatatacggaagaaggcgaccgaggttggagcgaaggtggacgcgctgcagaacgagggcgcgggcgcatgtcgaaagatatgtgagactgaaagctattcgggtcgggtttgtttgaacacggatttgaatgagtacccgagtccggaatcttcagatgagaatgatgagaattaa

SEQ ID NO: 176 - protein, 153 aa, Helianthus annuus
MGAQHHHTTQNSSTRKPQNTKPYRGIRMRKWGKWVAEIREPNKRSRIWLGSYSSPVAAARAYDTAVFYLRGPSARLNFPDKIGDDGCGLCDLSAADIRKKATEVGAKVDALQNEGAGACRKICETESYSGRVCLNTDLNEYPSPESSDENDEN

SEQ ID NO: 177 - DNA, 747 bp, Oryza sativum
atgtttgtaaggtttatagtctgctatttacctgctctaatcccccatctacccactgcgccacgcacgcacttaatcccctctatttatagaccccaccactcatttccccaggagaaaaagccgaagccaagacacgcaggtgtcgcctcgcctcgcctcgccctcgcgccgctgcggaattccgcgaggatggataggagggaggccaccgtcttcttgcccccgccgccgccaccgcagccgacgcagccgcagcagcagcctgcggcggcggcggtgagggctccggtaggcgggaggggtgggggaggagggaggcagtatcgcggggtgcggatgcggaagtgggggaagtgggtggcggagatccgcgagccgaacaagcggtcgcggatctggctcggctcctactccaccgccgtcgccgccgcgcgggcctacgacaccgccgtgttctacctccgcggccgctccgcgcgcctcaacttccccgaccagctcgacggcgcgggtggtggtggcgcgggcgccggcggcgccgaggaccacagggagctcaccgccgccgtcatccgcaagaaggccgccgaggtcggcgcccgcgtcgacgcgcagcactccgtcgtcggcgccgcggcgcccgtgccgctccagccgccgcagcccccgccgccccagcgccgccggaccaagaaccccgacctcaaccgggagcccaccccggacacctccgacgacgagtag

SEQ ID NO: 178 - protein, 248 aa, Oryza sativum
MFVRFIVCYLPALIPHLPTAPRTHLIPSIYRPHHSFPQEKKPKPRHAGVASPRLALAPLRNSARMDRREATVFLPPPPPPQPTQPQQQPAAAAVRAPVGGRGGGGGRQYRGVRMRKWGKWVAEIREPNKRSRIWLGSYSTAVAAARAYDTAVFYLRGRSARLNFPDQLDGAGGGGAGAGGAEDHRELTAAVIRKKAAEVGARVDAQHSVVGAAAPVPLQPPQPPPPQRRRTKNPDLNREPTPDTSDDE

SEQ ID NO: 179 - DNA, 579 bp, Brassica napus
atggagacagtgatggaagtggcggcggctgttcctacttcgacggttgcggcgccggcggcgacgaggaagagagagaaaccgtataaagggataaggatgaggaagtgggggaagtgggtggcggagattagagagcctaacaaacggtctaggatctggcttggctcttactcaactcccgaggcggcggcgagagcttacgacacggcggtgttctatctccgaggtccgtctgctcggcttaacttcccggagcttttagccggcgttacggtagcgggaggaaacggtggtggggatatgtcggcggcttacataaggagaaaagcagcggaggttggagcgcaagtggatgcgttagaagcggcgggaggcaatcgtcgtcatcatcatcatcaacagtatcaacgtggtaatcatgattacgtggatgatgatcatagtgttaatcatagtgattatcgccttaatgatggtcagcatgagtgtagtagtaaggataagaggtgtaacgggtcatgggaagctgtcgatttaaacaaattacccgacccggaaacttctgaggacgattag

SEQ ID NO: 180 - protein, 192 aa, Brassica napus
METVMEVAAAVPTSTVAAPAATRKREKPYKGIRMRKWGKWVAEIREPNKRSRIWLGSYSTPEAAARAYDTAVFYLRGPSARLNFPELLAGVTVAGGNGGGDMSAAYIRRKAAEVGAQVDALEAAGGNRRHHHHQQYQRGNHDYVDDDHSVNHSDYRLNDGQHECSSKDKRCNGSWEAVDLNKLPDPETSEDD

SEQ ID NO: 181 - DNA, 510 bp, Brassica napus
atggagacgggagcgaaagtaacggcggcgacgatggggatagggacgaggaaaagagatctgaaaccgtacaaagggatacggatgaggaaatgggggaagtgggtggctgagattagagaacccaacaagcgttccaggatctggctcggttcttactctactcccgaagcggcggcgagagcttacgacactgctgttttctacctccgtggtccttcggcgaggctcaatttcccggagcttttggctggacttactagttcaggcggtggtggagatatgtcggcagcggatataaggagaaaagcggcggaggttggtgctcaggtggacgcgctcggagcgacggtggtggtgaaacccggcgagagtctcggtggttacgaggataaggataactgtactggagttaagagcggtaacgggtcgttggaacgggtcgatttgaataagttgcccgacccggaaaattcggaagatgacgaccaatgggtgaagaggagatag

SEQ ID NO: 182 - protein, 169 aa, Brassica napus
METGAKVTAATMGIGTRKRDLKPYKGIRMRKWGKWVAEIREPNKRSRIWLGSYSTPEAAARAYDTAVFYLRGPSARLNFPELLAGLTSSGGGGDMSAADIRRKAAEVGAQVDALGATVVVKPGESLGGYEDKDNCTGVKSGNGSLERVDLNKLPDPENSEDDDQWVKRR

SEQ ID NO: 183 - DNA, 531 bp, Brassica napus
atggagacgggagcgaaagttacggcggcgacaggggcggtgacggcggcgacgatggggatagggacgaggaaaagagatctgaaaccgtacaaagggatacggatgaggaaatgggggaagtgggtggctgagattagagaacccaacaagcgttccaggatctggctcggttcttactctactcccgaagcggcggcgagagcttacgacactgctgttttctacctccgtggtccttcggcgaggctcaattttccggagcttttggctggacttactggttcaggcggtggtggagatatgtcggcggcgtatataaggagaaaagcggcggaggtcggtgctcaggtggacgcgctcggagcgacggtggtggttaaacccggcgagagtctcggtggttacgaggataaggataattgtaatggagttaagagcggtaacgggtcgttggagcgggtcgatttgaataaattgcccgacccggaaaattcggatgatgacgaccaatgggtgaagaggagatag

SEQ ID NO: 184 - protein, 176 aa, Brassica napus
METGAKVTAATGAVTAATMGIGTRKRDLKPYKGIRMRKWGKWVAEIREPNKRSRIWLGSYSTPEAAARAYDTAVFYLRGPSARLNFPELLAGLTGSGGGGDMSAAYIRRKAAEVGAQVDALGATVVVKPGESLGGYEDKDNCNGVKSGNGSLERVDLNKLPDPENSDDDDQWVKRR

SEQ ID NO: 185 - DNA, 531 bp, Arabidopsis thaliana
atggagacggaagcggcggtgacagcgacggttacggcggcgacgatggggattgggacgaggaagagagatctgaaaccgtataaaggaatacgaatgaggaaatgggggaaatgggtggcggagatacgggaaccgaataagagatcaaggatctggttaggttcttatgcgacgcctgaagcggcggcgagagcttacgacactgctgttttttacctccgtggtccttcagcgaggcttaattttccggagcttttggctggacttactgtttctaacggcggaggaagaggtggtgatttatcggcggcgtatattaggagaaaagcggcggaggttggtgctcaggttgatgcgcttggagcgacggtggttgtgaataccggcggcgagaatcgcggtgattacgagaagattgagaattgtcgtaagagcggtaacgggtcattggaacgggtcgatttgaataaattacccgacccggaaaattcggatggtgatgatgacgaatgtgtgaaaagaagatag

SEQ ID NO: 186 - protein, 176 aa, Arabidopsis thaliana
METEAAVTATVTAATMGIGTRKRDLKPYKGIRMRKWGKWVAEIREPNKRSRIWLGSYATPEAAARAYDTAVFYLRGPSARLNFPELLAGLTVSNGGGRGGDLSAAYIRRKAAEVGAQVDALGATVVVNTGGENRGDYEKIENCRKSGNGSLERVDLNKLPDPENSDGDDDECVKRR

SEQ ID NO: 187 - DNA, 591 bp, Arabidopsis thaliana
atggagacggcgactgaagtggccacggtggtgtcaactccggcggttacggttgcggcggtggcgacgaggaagagagataagccgtataaagggataaggatgaggaagtgggggaagtgggtggcggagataagagagcctaataaaaggtcaaggatctggcttggctcttactctactcctgaagcggcggcgcgtgcttacgacacggcggtgttttatctccgaggtccttctgctcggcttaacttcccggagcttttagccggagtgacggtgacgggaggaggcggaggaggagtgaacggtggtggagatatgtcggcggcgtatataaggagaaaagcggcggaggttggagcacaagtggatgcgttagaagcggcgggggcgggagggaatcgtcatcatcatcatcatcaacatcaacgtggtaatcatgattacgtagataatcatagtgattatcgtattaatgatgatcttatggagtgtagtagtaaagaagggtttaagaggtgtaatggatcgttggaacgggttgatttaaacaaattacccgatccggaaacttcagatgacgattag

SEQ ID NO: 188 - protein, 196 aa, Arabidopsis thaliana
METATEVATVVSTPAVTVAAVATRKRDKPYKGIRMRKWGKWVAEIREPNKRSRIWLGSYSTPEAAARAYDTAVFYLRGPSARLNFPELLAGVTVTGGGGGGVNGGGDMSAAYIRRKAAEVGAQVDALEAAGAGGNRHHHHHQHQRGNHDYVDNHSDYRINDDLMECSSKEGFKRCNGSLERVDLNKLPDPETSDDD

SEQ ID NO: 189 - DNA, 594 bp, Brassica napus
atggagacagcgagggatgtggcggcggctgttcctgctttgacggttgcggcggcggcggcgacgaggaagagagagaaaccgtataaagggataaggatgaggaagtgggggaagtgggtggcggagatcagagagcctaataaacggtcgaggatatggcttggctcttactctactcctgaagcggcggctagagcttacgacacggcggtatactatctccggggtccgtccgctcggcttaacttcccggagcttttagccggcgttacggtggagggaggaaacggtggtggggatatgtcggcggcttatataaggagaaaagcggctgaggttggagctcaggtggatgcgttagaagcggcgggagggaatcgtcatcaccatcaccatcatcaacaacagcaacaacaacgaggaagtcatgagtacgtggatgatgatcatagtcttaatcatagtgactatcgtcttaatgatggtcacaacgagtgtagtagtaaggaagagtttaagaggtgtaacgggtcatgggaagcggtcgatttaaacaaactacccgacccggaaacatctgatgacgattaa

SEQ ID NO: 190 - protein, 197 aa, Brassica napus
METARDVAAAVPALTVAAAAATRKREKPYKGIRMRKWGKWVAEIREPNKRSRIWLGSYSTPEAAARAYDTAVYYLRGPSARLNFPELLAGVTVEGGNGGGDMSAAYIRRKAAEVGAQVDALEAAGGNRHHHHHHQQQQQQRGSHEYVDDDHSLNHSDYRLNDGHNECSSKEEFKRCNGSWEAVDLNKLPDPETSDDD

SEQ ID NO: 191 - DNA, 564 bp, Populus trichocarpa
taaaagtgattaatccacatataaggcttcatgattttgatcagccatataacatacctccttttggccatgttagcaacccatcggattaccaccggtggctaaactcctctcccactcatctccatcggaatcctctgggtcaggcaccttattcaggtcaaccggccgtgattttaactctctactatcaacgaccgtttcattattatcattgctactggtactattactactatttctttgacggtcatcgtgatggcggtggtggtggtggtttaacgctgtctcaaaagcatcgacacgagctccaacctcggttgctcttttccttatagaagcagctgacatgtccccatatgatccaccgcagctaaaattctctccagccaaaaattcaggaaaattcaacctcgccgacggtcctctcaaataaaaaacggcggtgtcataagcgcgagccgccgctacaggtgttgagtacgaaccaagccaaatccttgaccttttgttaggctctcttatctcagccacccattttccccacttcctcatccttattcc

SEQ ID NO: 192 - protein, 187 aa, Populus trichocarpa
MESGVDKEMATRKRGGMGSERQYKGIRMRKWGKWVAEIREPNKRSRIWLGSYSTPVAAARAYDTAVFYLRGPSARLNFPEFLAGENFSCGGSYGDMSAASIRKRATEVGARVDAFETALNHHHHRHHDDRQRNSSNSTSSNDNNETVVDSRELKSRPVDLNKVPDPEDSDGDEWERSLATGGNPMGC

SEQ ID NO: 193 - DNA, 549 bp, Populus trichocarpa
atggaaagtggagtagacaaggatatggcaacaagaaagagaggagggatagaaagtgagaggcaatacaaggggataaggatgaggaagtggggaaaatgggtggctgagataagagagcccaacaaaaggtcaaggatttggcttggttcctactcaacaccagtagcggcggctcgtgcttatgacaccgccgttttttatttgagagggccatcggcgaggctcaattttcctgaagttttggctgcagagggttttggtggcggtggatcatgcggggacatgtcagctgcttctataaggaaaagagcaactgaggttggagctcatgttgacgctatcgagacagcgttaaaccaccaccaccaccaccaccaccaccaccttcatcatgatgaccgtcaaagaaacagtaataatagtagcagtagtaatgataataatgaaacggtcgttgatagtagagagttgaagccacggccggttgacttgaataaggtgcctgacccagaggattccgatggagatgagtggaagaggagttaa

SEQ ID NO: 194 - protein, 182 aa, Populus trichocarpa
MESGVDKDMATRKRGGIESERQYKGIRMRKWGKWVAEIREPNKRSRIWLGSYSTPVAAARAYDTAVFYLRGPSARLNFPEVLAAEGFGGGGSCGDMSAASIRKRATEVGAHVDAIETALNHHHHHHHHHLHHDDRQRNSNNSSSSNDNNETVVDSRELKPRPVDLNKVPDPEDSDGDEWKRS

SEQ ID NO: 195 - DNA, 522 bp, Populus trichocarpa
atggaaagtggagtagacaaggatatggcaacaagaaagagaggcgggatagaaagtgagaggcaatacaaggggataaggatgaggaagtggggaaaatgggtggctgagataagagagcccaacaaaaggtcgaggatttggcttggttcctactcaacaccagtagcggcggctcgtgcttatgacaccgccgttttttatttgagagggccatcggcgaggctcaattttcctgaatttttggctggagagggttttggcgggggtggatcatgtggggacatgtcagctgcttctataaggaaaagagcaactgaggttggagctcatgttgacgctattgagacagcgttaaaccaccaccaccaccaccttcatcatgatgaccgtcaaagaaacagcaataatagtagcagtagtaatgataataatgaaacggtcgttgatagtaaagagttgaagccacggccggttgacttgaataaggtgcctgacccacaaggattccgatggagatga

SEQ ID NO: 196 - protein, 173 aa, Populus trichocarpa
MESGVDKDMATRKRGGIESERQYKGIRMRKWGKWVAEIREPNKRSRIWLGSYSTPVAAARAYDTAVFYLRGPSARLNFPEFLAGEGFGGGGSCGDMSAASIRKRATEVGAHVDAIETALNHHHHHLHHDDRQRNSNNSSSSNDNNETVVDSKELKPRPVDLNKVPDPQGFRWR

SEQ ID NO: 197 - DNA, 507 bp, Glycine max
atggagagtgaaggaagaagagaaggaggagagagagaaacaacagcagcgacgaggaaggtggagggtgctgagagaagatacaaaggaataaggatgaggaagtggggcaagtgggtcgctgaaattagagaacccaataagcgttcaaggatttggctcggttcctattctacccctgtcgccgccgcacgtgcctacgacacggccgtcttttacctccggggaccctccgcacgcctcaacttcccggagcttctcgtcagagaaggcccggccgccctagtcgccggctgcgacatgtcagcggcttctattaggaagaaggccaccgaggtcggtgctagagtcgatgctcttcaggcaacccttcaccaccactacgtgcccccgcggcaacttctctctggcggtggtggtgggtccggggatttcccggtgcgggttgttgacctgaataagatgcctgaacccgagagttcggactgtgagtgggatgtgaattga

SEQ ID NO: 198 - protein, 168 aa, Glycine max
MESEGRREGGERETTAATRKVEGAERRYKGIRMRKWGKWVAEIREPNKRSRIWLGSYSTPVAAARAYDTAVFYLRGPSARLNFPELLVREGPAALVAGCDMSAASIRKKATEVGARVDALQATLHHHYVPPRQLLSGGGGGSGDFPVRVVDLNKMPEPESSDCEWDVN

SEQ ID NO: 199 - DNA, 462 bp, Arabidopsis thaliana
atggaaagagaacaagaagagtctacgatgagaaagagaaggcagccacctcaagaagaagtgcctaaccacgtggctacaaggaagccgtacagagggatacggaggaggaagtggggcaagtgggtggctgagattcgtgagcctaacaaacgctcacggctttggcttggctcttacacaaccgatatcgccgccgctagagcctacgacgtggccgtcttctacctccgtggcccctccgcacgtctcaacttccctgatcttctcttgcaagaagaggaccatctctcagccgccaccaccgctgacatgcccgcagctcttataagggaaaaagcggcggaggtcggcgccagagtcgacgctcttctagcttctgccgctccttcgatggctcactccactccgccggtaataaaacccgacttgaatcaaatacccgaatccggagatatatag

SEQ ID NO: 200 - protein, 153 aa, Arabidopsis thaliana
MEREQEESTMRKRRQPPQEEVPNHVATRKPYRGIRRRKWGKWVAEIREPNKRSRLWLGSYTTDIAAARAYDVAVFYLRGPSARLNFPDLLLQEEDHLSAATTADMPAALIREKAAEVGARVDALLASAAPSMAHSTPPVIKPDLNQIPESGDI

SEQ ID NO: 201 - DNA, 540 bp, Triticum aestivum
atggagagggaagccacggtcgccttctacccgccggcgccggcgccgcagcagcagcgccccacggccgcgcagccgctctcggcccgcgtgcctgccggcggcgtccacgcgggccggggaggagggggcaggcagtaccgcggggtgcggatgcgcaagtggggcaagtgggtggccgagatccgggagcccaacaagcggtcgcggatctggctcggctcctacgccaccgccgtcgccgccgcgcgcgcctacgacaccgccgtcttctacctccgcggccgctccgcgcgcctcaacttccccgaccagctcctcgacggcactgcccccgccgccgcgcccggggacctcaccgccgccgccatccgcaagaaggccgccgaggtcggcgcgcgcgtcgacgcgctccactccggcggcatcggggtcggcatgggcgcccctgcggcaccgccgtcgccgtcccagcgccgcagggccaagaaccccgacctcaaccgggagcccacccccgacaccgacgacgacgagtga

SEQ ID NO: 202 - protein, 179 aa, Triticum aestivum
MEREATVAFYPPAPAPQQQRPTAAQPLSARVPAGGVHAGRGGGGRQYRGVRMRKWGKWVAEIREPNKRSRIWLGSYATAVAAARAYDTAVFYLRGRSARLNFPDQLLDGTAPAAAPGDLTAAAIRKKAAEVGARVDALHSGGIGVGMGAPAAPPSPSQRRRAKNPDLNREPTPDTDDDE

SEQ ID NO: 203 - DNA, 450 bp, Helianthus annuus
atggagccagccgccaccaccgccgccacttcatcaaactcaaaaccctacagaggaatccggatgcgcaagtggggcaaatgggttgccgaaattcgtgagccaaataaacgctcacgaatctggctcggctcctactcctcgccgatagccgccgcacgcgcttacgacacagctgttttctacctccgcggcccatcggctcggcttaattttcctgactcaattggagaatatggcggctgctccgccggcggcttacacgacctctcagccgcagctattcggaaaaaggctactgaagtcggcgcgaaagtggatgcgctggaaaaccagaacggcgcgagccggcagcgcgagccggtgggggttcaaaggtgttcgggtcgggtttgtttgaatacggatttgaatgagtacccgactccggaaacgtccgatgagaattaa

SEQ ID NO: 204 - protein, 149 aa, Helianthus annuus
MEPAATTAATSSNSKPYRGIRMRKWGKWVAEIREPNKRSRIWLGSYSSPIAAARAYDTAVFYLRGPSARLNFPDSIGEYGGCSAGGLHDLSAAAIRKKATEVGAKVDALENQNGASRQREPVGVQRCSGRVCLNTDLNEYPTPETSDEN

SEQ ID NO: 205 - DNA, 501 bp, Solanum lycopersicum
atggagataggtggtgggggtcaaagtggagttgctgcaaattcaggggtttgttgtggtgggaagagaaagaacgaaaagccctataaagggattcgtatgaggaagtggggaaaatgggttgcagaaattagagaacccaacaagcgttcgaggatttggttgggttcgtattcaacgccggtggctgcggctcgggcttatgatacggcggtctattatctaatatgcccttcggcccgattgaattttcccgagttgttagttggtgatggtgggcttaatgatttgtctgctgcttcgattcgtaaaaaagccatagaagttggtgctcaagtagatgctgtacagaactcgcttgcaacccatcataaccatacagaggaaaaggtgcactctgagacggcaagcccctcagaattgaagccttgttggtttcaagagaagcccgatttaaacttgaagcccgagcccgaagatccagaagtggattactggtaa

SEQ ID NO: 206 - protein, 166 aa, Solanum lycopersicum
MEIGGGGQSGVAANSGVCCGGKRKNEKPYKGIRMRKWGKWVAEIREPNKRSRIWLGSYSTPVAAARAYDTAVYYLICPSARLNFPELLVGDGGLNDLSAASIRKKAIEVGAQVDAVQNSLATHHNHTEEKVHSETASPSELKPCWFQEKPDLNLKPEPEDPEVDYW

SEQ ID NO: 207 - DNA, 555 bp, Arabidopsis thaliana
atggaaggcggcggagttgctgacgtggctgtccccggtacgaggaagagagacagaccttacaaaggaattaggatgaggaagtggggaaagtgggtggcggagattcgtgagcctaacaagcgctctaggttatggcttggctcttactctactcccgaggcggcggcgcgagcttacgacacggcggttttctatcttagaggacctacggcgaggcttaacttccctgagcttcttcctggggagaaattctccgacgaggatatgtcggctgcgaccatcaggaagaaagccacggaggtcggtgctcaggttgatgctttgggcacggcggtgcaaaataaccgccaccgtgtttttggtcagaatcgagatagtgatgtggataataagaattttcatcggaattatcaaaacggtgaacgagaagaagaagaagaagatgaggatgacaagagattgaggagtggcggccggttattggatcgggttgacttgaataaattacccgacccggaaagctccgatgaagaatgggaaagcaaacattaa

SEQ ID NO: 208 - protein, 184 aa, Arabidopsis thaliana
MEGGGVADVAVPGTRKRDRPYKGIRMRKWGKWVAEIREPNKRSRLWLGSYSTPEAAARAYDTAVFYLRGPTARLNFPELLPGEKFSDEDMSAATIRKKATEVGAQVDALGTAVQNNRHRVFGQNRDSDVDNKNFHRNYQNGEREEEEEDEDDKRLRSGGRLLDRVDLNKLPDPESSDEEWESKH

SEQ ID NO: 209 - DNA, 567 bp, Brassica napus
atggagggcggcggaggagtagctaacgtggcagtctccgggacgacgacgacgaggaagagagagagaccttacaagggtataaggatgaggaagtggggcaaatgggttgcggagattcgagagcctaacaagcgctctaggttatggctcggctcttactccacccccgaggcggctgctcgagcctacgacacggcggttttctacctcagaggaccgacggcgaggctcaacttccctgagcttcttaccggagagaaatttaccgaggaggatatgtcggccgcgacgatcaggaagaaagcaacggaggtgggtgctcaggtagacgctttgggctcggcggtgctagataaccgccaccgtgtttttggtcaggaccaagagagttgcgatgatagcaagaattttcgtcggaattatcaaaacggtgatggagaagaacatgaagacgatgatgaagacgagaagaggttgaagagtggcgggtggttattggaacgggttgacttgaataaactacccgacccggagagctccgatgaagactgggagagcaaataa

SEQ ID NO: 210 - protein, 188 aa, Brassica napus
MEGGGGVANVAVSGTTTTRKRERPYKGIRMRKWGKWVAEIREPNKRSRLWLGSYSTPEAAARAYDTAVFYLRGPTARLNFPELLTGEKFTEEDMSAATIRKKATEVGAQVDALGSAVLDNRHRVFGQDQESCDDSKNFRRNYQNGDGEEHEDDDEDEKRLKSGGWLLERVDLNKLPDPESSDEDWESK

SEQ ID NO: 211 - DNA, 468 bp, Populus trichocarpa
atggaaggagggtgctgtacatcgtcaacaagtactccaagttcaacttcaacagcaaccacagagaaacggaagcatagcaggcaacaaaaccaagagaagccatacagagggataaggatgaggaagtggggtaagtgggtagcagaaattagagaaccaaacaagaggtctaggatttggcttgggtcctactcaacaccaatagctgcagctcgtgcatacgacacggctgttttctatctgcgaggcccttctgctaggcttaatttccctgatttgatataccaagaagatgagctgcgagatgtgtctgctgcttctatacgcaagaaagccactgaagttggggctaaagtggatgccttacaaaccgctgtccatgcatcaccagaagataactcacgagtgttactttcagagaaacctgatttgaacaagttcccagaaaattctgatgaagagtga

SEQ ID NO: 212 - protein, 155 aa, Populus trichocarpa
MEGGCCTSSTSTPSSTSTATTEKRKHSRQQNQEKPYRGIRMRKWGKWVAEIREPNKRSRIWLGSYSTPIAAARAYDTAVFYLRGPSARLNFPDLIYQEDELRDVSAASIRKKATEVGAKVDALQTAVHASPEDNSRVLLSEKPDLNKFPENSDEE

SEQ ID NO: 213 - DNA, 453 bp, Glycine max
atggaaggagaaggaggaagcgcaaccagaaagagagggaaagatggtgagactgagacgacgacacgttacaaaggaatcagaatgagaaagtggggcaagtgggtcgctgagattcgagaacccaacaagcgttccaggatttggctcggttcttactccacgcccgtcgcggcggcgcgtgcttatgacaccgccgttttctatctccgggggccctccgcgcgcctcaacttcccggagcttctcgccgcggagggccccgccgcctccgacgccgtcatgtccgcggcctccatccggaagaaggccaccgaggttggcgcccgagtcgacgcacttcaccgccaggacccccacgcgccgcctgccggagaattcgccgaccgagtcgaccttaataagatacccgaacccgagaattccgattgtgactactggggcggggattag

SEQ ID NO: 214 - protein, 150 aa, Glycine max
MEGEGGSATRKRGKDGETETTTRYKGIRMRKWGKWVAEIREPNKRSRIWLGSYSTPVAAARAYDTAVFYLRGPSARLNFPELLAAEGPAASDAVMSAASIRKKATEVGARVDALHRQDPHAPPAGEFADRVDLNKIPEPENSDCDYWGGD

SEQ ID NO: 215 - DNA, 444 bp, Glycine max
atggaaggagaagaaggaggaattgcaacaaagaagagagggaaagagggtgaaactgagacgacgcgctacaaaggaatcagaatgagaaagtggggcaagtgggtcgctgagattcgagaacccaacaagcgttcaaggatttggctcggttcttactccacgcccgtcgcggcggcgcgtgcttacgacaccgccgttttccacctccggggcccctctgcgcgcctcaacttccccgagcttgttgccgcggagggccccgccgccgacatgtccgcagcctccatcaggaagaaggccaccgaggtcggcgccagagtcgacgctctccaccgccagcacccccacgcgctgcctgctggagaattcgccgaccgggttgaccttaataagatgcccgaacccgagaattcggattgtgactactgggacagggattag

SEQ ID NO: 216 - protein, 147 aa, Glycine max
MEGEEGGIATKKRGKEGETETTRYKGIRMRKWGKWVAEIREPNKRSRIWLGSYSTPVAAARAYDTAVFHLRGPSARLNFPELVAAEGPAADMSAASIRKKATEVGARVDALHRQHPHALPAGEFADRVDLNKMPEPENSDCDYWDRD

SEQ ID NO: 217 - DNA, 477 bp, Populus trichocarpa
atggaaggagagtgttatacatcaccaagtgcttcaagttcaactccaacaatatcaagcatagggaagcgtaagcatggtaggcaacaaaaccaggagaagccatatagagggataaggatgaggaagtggggtaagtgggtagctgaaattagagaaccaaacaagaggtctaggatttggcttgggtcctactcaacaccaattgctgcagctcgtgcatacgacacagccgttttctatctccgagggccttctgttaggcttaatttccctgatttgattcaccaagaagatgagttgtgtgatgtgtctgctgcttctatacgcaagaaagccactgaagtcggggctaaagttgatgccttgcaaacagctctccatgcatcaccaggagacaactcgccagcaaatcgactgttactttcagagaaacctgatttgaacgagtacccagagaattgtgatgaagagtga

SEQ ID NO: 218 - protein, 158 aa, Populus trichocarpa
MEGECYTSPSASSSTPTISSIGKRKHGRQQNQEKPYRGIRMRKWGKWVAEIREPNKRSRIWLGSYSTPIAAARAYDTAVFYLRGPSVRLNFPDLIHQEDELCDVSAASIRKKATEVGAKVDALQTALHASPGDNSPANRLLLSEKPDLNEYPENCDEE

SEQ ID NO: 219 - DNA, 525 bp, Glycine max
atggaagaaagagatcaccgttgttccaacaattcaacgatgatcacaacaacaaagaaaaaaacgagcagaagaagtcccacatcggataagctgaagaatcaacacccctgtgagaagcaggcgatgaaaccgtacagaggaataaggatgcgaaagtgggggaagtgggtggcggagatcagagaacccaacaagaggtcgaggatttggttgggttcgtacacgacacccatggccgccgcacgcgcctacgacacagccgttttctacctccgaggtcccaccgcacgccttaacttccccgaactcttgttccaggacgaccaggaggagggcaatgattcggtgcagcacggtgcagcagcagggaacatgtccgctgattccattcgccgaaaagccacgcaagtcggcgccagagtcgacgctctccaaaccgcgcttcaccaccacgcgtcaagtaccaactctctcaaacccgacttgaacgagtttccaaaactcgaatcccttcaagattga

SEQ ID NO: 220 - protein, 174 aa, Glycine max
MEERDHRCSNNSTMITTTKKKTSRRSPTSDKLKNQHPCEKQAMKPYRGIRMRKWGKWVAEIREPNKRSRIWLGSYTTPMAAARAYDTAVFYLRGPTARLNFPELLFQDDQEEGNDSVQHGAAAGNMSADSIRRKATQVGARVDALQTALHHHASSTNSLKPDLNEFPKLESLQD

SEQ ID NO: 221 - DNA, 543 bp, Medicago truncatula
atggaagaagaagatagggaatattgttgttcgatgaattcaagaacaaccaatagccctatagctatagatcataaaaataacaataacaataaggggatgaaaaaagagaaaaaagctatgaaaccatatagaggaataaggatgagaaagtggggtaagtgggtggcagagattagagaaccaaacaaaagatcaagaatttggttaggttcttacataacacctattgctgctgcacgtgcttatgatactgctgtgttttatcttagaggtccttctgcaaaccttaattttcctgaattgttgttcaaagatcaacaagaagatgaagaaaatctacaacaacatgggaatatgtcggctgattcaataaggaaaaaagctgcacaagttggtgctagagttgatgctattgaaactaattctctaattaatcatcatcatcatcatcatgtttcttccaataatcatgttcactccaattctacttcttctctcaaacctgacttgaatgagtttccaaaacctgaagattgttga

SEQ ID NO: 222 - protein, 180 aa, Medicago truncatula
MEEEDREYCCSMNSRTTNSPIAIDHKNNNNNKGMKKEKKAMKPYRGIRMRKWGKWVAEIREPNKRSRIWLGSYITPIAAARAYDTAVFYLRGPSANLNFPELLFKDQQEDEENLQQHGNMSADSIRKKAAQVGARVDAIETNSLINHHHHHHVSSNNHVHSNSTSSLKPDLNEFPKPEDC

SEQ ID NO: 223 - DNA, 483 bp, Glycine max
atggaagaagcgggtttaggagattgttgttcctctaatacgactattacgaggaaaagcgagaagcgaaagcagcagcaccaacaacaagagaagccatacagaggaataaggatgaggaagtggggcaagtgggtggcggagattagagaacccaacaagaggtcgaggatctggttgggttcttacgccacccccgtcgccgccgcacgcgcctacgacaccgccgtcttccacctccgaggcccttccgctcgcctcaacttccccgaattgctgtcccaggacgacgacgtttcgacccaacaacagggcaacatgtccgccgattcaattcgcaaaaaagccacccaagtcggcgccagagtcgacgcgctccaaaccgcgcttcagcaatcctcgtccacacactccattagttccagccacgtcagcagctatgagaaaccagacttgaacgagtatcccaaacctgaagattag

SEQ ID NO: 224 - protein, 160 aa, Glycine max
MEEAGLGDCCSSNTTITRKSEKRKQQHQQQEKPYRGIRMRKWGKWVAEIREPNKRSRIWLGSYATPVAAARAYDTAVFHLRGPSARLNFPELLSQDDDVSTQQQGNMSADSIRKKATQVGARVDALQTALQQSSSTHSISSSHVSSYEKPDLNEYPKPED

SEQ ID NO: 225 - DNA, 525 bp, Glycine max
atggaagacagggatcactgttgttccaacaattcaacgatgatcacaacaacaaagaaaagaacgggtagaagaagtccaacatcggataagctcaagaatcaacaccgcgagaagcagtcgatgaaaccttaccgtggaataaggatgcggaagtgggggaagtgggtggcggagatcagagaacccaacaaaaggtcgaggatatggttgggttcttacacgacacccgtggccgccgcacgtgcctacgacaccgctgtcttttacctccggggtcccaccgcgcgccttaacttccccgaactcttgttccaggacgacgaccaggagggcagtgattcggtgcagcacggcgcagcagggaacatgtccgctgattccattcgccgaaaagccacgcaagtcggcgccagagtcgacgctctccaaaccgcgcttcaccaccacgcgccaagtaccaactctctcaatctcaagcccgacttgaacgagtttccaaaactcgaagagcttcaagattga

SEQ ID NO: 226 - protein, 174 aa, Glycine max
MEDRDHCCSNNSTMITTTKKRTGRRSPTSDKLKNQHREKQSMKPYRGIRMRKWGKWVAEIREPNKRSRIWLGSYTTPVAAARAYDTAVFYLRGPTARLNFPELLFQDDDQEGSDSVQHGAAGNMSADSIRRKATQVGARVDALQTALHHHAPSTNSLNLKPDLNEFPKLEELQD

SEQ ID NO: 227 - DNA, 504 bp, Helianthus annuus
atggaagccagaaaacccttctccggcagcgtctccggtgacttaaactattctccggcggctggaaaaagaaagtccgatcaacgaccgtacaaagggatccggatgagaaagtggggaaagtgggtagccgaaattcgggagccgaataagcggtcgaggatatggctcggctcgtattcgactcccttagccgccgcacgggcgtatgacacggccgtgtactacctacgggggccgtcggctcggcttaacttcccggagttgatggcttctgatggcggcttggatgagctgagcacggcttctattaggaaaaaagctattgaagttggggctagagtagatgcagagacgtgttgtacgttggtgcataagagtggtacgtttgagcatcatcataattgtccttctagttctgagttgaagaaggcttgttggtttcaagaaaagcctgatttgaataagaaacccgaatccgaagacccggatggagattgttga

SEQ ID NO: 228 - protein, 167 aa, Helianthus annuus
MEARKPFSGSVSGDLNYSPAAGKRKSDQRPYKGIRMRKWGKWVAEIREPNKRSRIWLGSYSTPLAAARAYDTAVYYLRGPSARLNFPELMASDGGLDELSTASIRKKAIEVGARVDAETCCTLVHKSGTFEHHHNCPSSSELKKACWFQEKPDLNKKPESEDPDGDC

SEQ ID NO: 229 - DNA, 474 bp, Helianthus annuus
atggaagccatcatcaccggcggcggagatgggccgtgcaaccgtccgccggagaaaaggaagagtgatcaacggccgtacaaggggatacgcatgaggaagtggggaaaatgggtggcggagattcgggagccgaataagcggtccaggatttggttggggtcctattcgacgcccgtggccgctgcacgggcgtacgacacggccgtatactacctacggggcccgacggccaggttgaattttcccgaattattggggtctgacgtggcgttcggggagttgtcggcggcgagtattcggaaaaaggcgatagaggttggggccagagtggatgcagagacgagttgtacgtcgttgcttaggagtggtacgcgtgtacccgggtctgggcttaaggcgtgttggtttcaggagaaacccgacttgaatatgaaacccgaacccgaggagaatgatggagattattggtga

SEQ ID NO: 230 - protein, 157 aa, Helianthus annuus
MEAIITGGGDGPCNRPPEKRKSDQRPYKGIRMRKWGKWVAEIREPNKRSRIWLGSYSTPVAAARAYDTAVYYLRGPTARLNFPELLGSDVAFGELSAASIRKKAIEVGARVDAETSCTSLLRSGTRVPGSGLKACWFQEKPDLNMKPEPEENDGDYW

SEQ ID NO: 231 - DNA, 666 bp, Zea mays
atggaggcggagcaggcggcgatggcgagcgcggctgcgccgcagctggggtcggcgcaccagcaccagcaccagcaccagcagatgcagccgcggcggcagtaccgcggcgtgcgcatgcgcaagtggggcaagtgggtggcggagatccgggagccgcacaagcgcacgcgcatctggctggggtcctacgccacggccgtggcggcggcgcgcgcctacgacacggccgtgttctacctgcgcggccggtcggcgcggctcaacttccccgacgagatcccgtcgctggcgccgtcggagggcgagggcgacggcgacggcggggagcccgcgcgcgaccccgccgacggcggcggcggcggcacgctgtccgccgcgtccatccggaagaaggccatcgaggtggggtcccgcgtggacgcgctgcaaaccggcatgatggtgccgccgccgcaccaccgggagcgccagaagcaccaccatcaccaccacccaccacctgccgcagctgcggatgcacgccgccgccgcggaggcggcggcggcggagcaccggcaggaggtgaagcagtcgccgcagcggccggcgtggagcgggcgcgtcaagaacccggatctaaaccgggcgcccagccccgagagctccgacgccgagtgacatga

SEQ ID NO: 232 - protein, 221 aa, Zea mays
MEAEQAAMASAAAPQLGSAHQHQHQHQQMQPRRQYRGVRMRKWGKWVAEIREPHKRTRIWLGSYATAVAAARAYDTAVFYLRGRSARLNFPDEIPSLAPSEGEGDGDGGEPARDPADGGGGGTLSAASIRKKAIEVGSRVDALQTGMMVPPPHHRERQKHHHHHHPPPAAAADARRRRGGGGGGAPAGGEAVAAAAGVERARQEPGSKPGAQPRELRRRVT

SEQ ID NO: 233 - DNA, 660 bp, Zea mays
atggaggcggagcaggcggcgatggcgagcgcggctgcgccgcagctggggtcggcgcaccagcaccagcaccagcaccagcagatgcagccgcggcggcagtaccgcggcgtgcgcatgcgcaagtggggcaagtgggtggcggagatccgggagccgcacaagcgcacgcgcatctggctggggtcctacgccacggccgtggcggcggcgcgcgcctacgacacggccgtgttctacctgcgcggccggtcggcgcggctcaacttccccgacgagatcccgtcgctggcgccgtcggagggcgagggcgacggcgacggcggggagcccgcgcgcgaccccgccgacggcggcggcggcggcacgctgtccgccgcgtccatccggaagaaggccatcgaggtggggtcccgcgtggacgcgctgcaaaccggcatgatggtgccgccgccgcaccaccgggagcgccagaagcaccaccatcaccaccaccaccacctgccgcagctgcggatgcacgccgccgccgcggaggcggcggcggcggagcaccggcaggaggtgaagcagtcgccgcagcggccggcgtggagcgggcgcgtcaagaacccggatctaaaccgggcgcccagccccgagagctccgacgccgagtga

SEQ ID NO: 234 - protein, 219 aa, Zea mays
MEAEQAAMASAAAPQLGSAHQHQHQHQQMQPRRQYRGVRMRKWGKWVAEIREPHKRTRIWLGSYATAVAAARAYDTAVFYLRGRSARLNFPDEIPSLAPSEGEGDGDGGEPARDPADGGGGGTLSAASIRKKAIEVGSRVDALQTGMMVPPPHHRERQKHHHHHHHHLPQLRMHAAAAEAAAAEHRQEVKQSPQRPAWSGRVKNPDLNRAPSPESSDAE

SEQ ID NO: 235 - DNA, 624 bp, Zea mays
atggaggcggagcaggcggcgatggcggcgccgcagctgggggcggcgcaccagcagacgcagccgcggcggcagtaccgcggcgtgcgcatgcgcaagtggggcaagtgggtggcggagatccgggagccgcacaagcgcacgcgcatctggctggggtcctacgccacggccgtggcggcggcgcgcgcctacgacacggccgtgttctacctgcgcgggcggtcggcgcggctcaacttccccgaggagatcccctcgttcgggctggcggatggcgtggacgtgggggagcacgcgcgcgacccggccgccgccgccgccggcggcggcggcggctgcacgctgtccgcggcgtccatacggaagaaggccatcgaggtggggtcccgcgtggacgcgctccagaccggcatggtggtcccgccgccgcaccaccgcgagcgccataggcaccacaaccacctgccgcagctgcgggtgcacgcggaggagcagcaggaggaagaggaagcagaagccgcagcggcctgcgtggagcgggcgcgtcaagaacccggatctgaaccgtgcgccgagccccgagagctccgacgccgagtgacaagcgagcgagagagctga

SEQ ID NO: 236 - protein, 207 aa, Zea mays
MEAEQAAMAAPQLGAAHQQTQPRRQYRGVRMRKWGKWVAEIREPHKRTRIWLGSYATAVAAARAYDTAVFYLRGRSARLNFPEEIPSFGLADGVDVGEHARDPAAAAAGGGGGCTLSAASIRKKAIEVGSRVDALQTGMVVPPPHHRERHRHHNHLPQLRVHAEEQQEEEEAEAAAACVERARQEPGSEPCAEPRELRRRVTSERES

SEQ ID NO: 237 - DNA, 555 bp, Oryza sativum
atggataggagggaggccaccgtcttcttgcccccgccgccgccaccgcagccgacgcagccgcagcagcagcctgcggcggcggcggtgagggctccggtaggcgggaggggtgggggaggagggaggcagtatcgcggggtgcggatgcggaagtgggggaagtgggtggcggagatccgcgagccgaacaagcggtcgcggatctggctcggctcctactccaccgccgtcgccgccgcgcgggcctacgacaccgccgtgttctacctccgcggccgctccgcgcgcctcaacttccccgaccagctcgacggcgcgggtggtggtggcgcgggcgccggcggcgccgaggaccacagggagctcaccgccgccgtcatccgcaagaaggccgccgaggtcggcgcccgcgtcgacgcgcagcactccgtcgtcggcgccgcggcgcccgtgccgctccagccgccgcagcccccgccgccccagcgccgccggaccaagaaccccgacctcaaccgggagcccaccccggacacctccgacgacgagtag

SEQ ID NO: 238 - protein, 184 aa, Oryza sativum
MDRREATVFLPPPPPPQPTQPQQQPAAAAVRAPVGGRGGGGGRQYRGVRMRKWGKWVAEIREPNKRSRIWLGSYSTAVAAARAYDTAVFYLRGRSARLNFPDQLDGAGGGGAGAGGAEDHRELTAAVIRKKAAEVGARVDAQHSVVGAAAPVPLQPPQPPPPQRRRTKNPDLNREPTPDTSDDE

SEQ ID NO: 239 - DNA, 948 bp, Oryza sativum
atggataaccacgccgtcgcggtccagcaacgcgacacggcgccccggccccgcgcccgcgcgcgcgcctccgtatccagtatccagggggggggggggcctggctgggctgaccacgtcgccctcccacgcccgccacgttgccacccgcgccgccctcccaccccatgtcggcgaccgctcgcgttcgcgtcctcctccatccatccgcatcgcgccgtgctgccaagcggcgcgccgcctcacgtgtcggccggggcgcgcgacacgggcggcgcggcggggctcgcgcgaccccaccactcatttccccaggagaaaaagccgaagccaagacacgcaggtgtcgcctcgcctcgcctcgccctcgcgccgctgcggaattccgcgaggatggataggagggaggccaccgtcttcttgcccccgccgccgccaccgcagccgacgcagccgcagcagcagcctgcggcggcggcggtgagggctccggtaggcgggaggggtgggggaggagggaggcagtatcgcggggtgcggatgcggaagtgggggaagtgggtggcggagatccgcgagccgaacaagcggtcgcggatctggctcggctcctactccaccgccgtcgccgccgcgcgggcctacgacaccgccgtgttctacctccgcggccgctccgcgcgcctcaacttccccgaccagctcgacggcgcgggtggtggtggcgcgggcgccggcggcgccgaggaccacagggagctcaccgccgccgtcatccgcaagaaggccgccgaggtcggcgcccgcgtcgacgcgcagcactccgtcgtcggcgccgcggcgcccgtgccgctccagccgccgcagcccccgccgccccagcgccgccggaccaagaaccccgacctcaaccgggagcccaccccggacacctccgacgacgagtag

SEQ ID NO: 240 - protein, 315 aa, Oryza sativum
MDNHAVAVQQRDTAPRPRARARASVSSIQGGGGPGWADHVALPRPPRCHPRRPPTPCRRPLAFASSSIHPHRAVLPSGAPPHVSAGARDTGGAAGLARPHHSFPQEKKPKPRHAGVASPRLALAPLRNSARMDRREATVFLPPPPPPQPTQPQQQPAAAAVRAPVGGRGGGGGRQYRGVRMRKWGKWVAEIREPNKRSRIWLGSYSTAVAAARAYDTAVFYLRGRSARLNFPDQLDGAGGGGAGAGGAEDHRELTAAVIRKKAAEVGARVDAQHSVVGAAAPVPLQPPQPPPPQRRRTKNPDLNREPTPDTSDDE

SEQ ID NO: 241 - DNA, 540 bp, Brassica napus
atggacggcggcggagtagctgacgtggcagtcgccatgacgacgaggaagagagagagaccttacaagggcataaggatgaggaagtggggaaaatgggttgcggagattcgagagcctaacaagcggacaaggctatggcttggctcttactccactcccgaggcggcggcgcgagcttacgacacggcggttttctacctcagaggaccaacggcgaggctcaacttccctgagtttcttaccggagagaaattctccgaggaggacatgtcgggtgatacgattaggaaaaaagcgacggaggtcggtgctcaggtagacgctttgggcacggcggtgctaaatagccgccaccgtgtgtttggtcagaacggagagagtgatgatagtgataagaattttcatcggagttatcgaaacggtgagtcagaagaagatgataagagtttgaagagtggcggctggttattggaacgggttgacttgaataaggtacccgacccggaaaactccgatgacgactgggaaagcaaataa

SEQ ID NO: 242 - protein, 179 aa, Brassica napus
MDGGGVADVAVAMTTRKRERPYKGIRMRKWGKWVAEIREPNKRTRLWLGSYSTPEAAARAYDTAVFYLRGPTARLNFPEFLTGEKFSEEDMSGDTIRKKATEVGAQVDALGTAVLNSRHRVFGQNGESDDSDKNFHRSYRNGESEEDDKSLKSGGWLLERVDLNKVPDPENSDDDWESK

SEQ ID NO: 243 - DNA, 540 bp, Brassica napus
atggacggcggcggagcagctgacgtggcagtcgccgtgacgacgaggaagagagagagaccttacaagggcataaggatgaggaagtggggaaaatgggttgcggagattcgagagcctaacaagcggacaaggctatggctcggctcttactccactcctgaggcggcggcgcgagcctacgacacggcggttttctacctcagaggaccaacggcgaggctcaacttccctgagtttcttaccggagagaaattctccgaggaggacatgtcgggcgatacgattaggaaaaaagcgacggaggtcggtgctcaggtagacgctttgggcacggcggtgctaaataaccgccaccgtgtgtttggtcagaacggagagagtgatgatagtaataagaattttcatcggaattatcgaaacggtgagtcagaagaagatgataagagtttgaagagtggcggctggttattggaacgggttgacttgaataaggtacccgacccggaaaactccgatgacgactgggaaagcaaataa

SEQ ID NO: 244 - protein, 179 aa, Brassica napus
MDGGGAADVAVAVTTRKRERPYKGIRMRKWGKWVAEIREPNKRTRLWLGSYSTPEAAARAYDTAVFYLRGPTARLNFPEFLTGEKFSEEDMSGDTIRKKATEVGAQVDALGTAVLNNRHRVFGQNGESDDSNKNFHRNYRNGESEEDDKSLKSGGWLLERVDLNKVPDPENSDDDWESK

SEQ ID NO: 245 - DNA, 462 bp, Arabidopsis thaliana
atggacgccggagtagcagtaaaagctgacgtggcagtcaaaatgaagagagaaagaccattcaaagggatcagaatgagaaaatgggggaaatgggttgcggagattcgagaacccaacaagcgttcaagactttggctcggctcttactctactcccgaagcggcggcgcgtgcatacgacacggctgtcttttacctcagaggaccaactgctacgctcaacttcccggagcttctgccgtgtacctccgccgaggatatgtcagcggcaacgatcaggaaaaaggcgacggaggtgggagctcaagtagatgcgataggggcgacggtggtgcagaacaacaaacgccgccgcgtttttagtcaaaagcgtgactttggcggcgggttattagagcttgttgacttgaacaagttacctgacccggaaaatctcgatgatgatttggtgggaaaatag

SEQ ID NO: 246 - protein, 153 aa, Arabidopsis thaliana
MDAGVAVKADVAVKMKRERPFKGIRMRKWGKWVAEIREPNKRSRLWLGSYSTPEAAARAYDTAVFYLRGPTATLNFPELLPCTSAEDMSAATIRKKATEVGAQVDAIGATVVQNNKRRRVFSQKRDFGGGLLELVDLNKLPDPENLDDDLVGK

SEQ ID NO: 247 - DNA, 1164 bp, Arabidopsis thaliana
atcaaaaaatctctatccatccacaacaacaacaaaaactcaagaacaatatctccacttgatcactaccacattgtccaatcactctacaaagcctgtacgtacacaacaacattaccatggtgaaacaagaacgcaagatccaaaccagcagcacaaaaaaggaaatgcctttgtcatcatcaccatcttcttcttcttcttcatcttcttcctcgtcttcgtcttcgtgtaagaacaagaacaagaagagtaagattaagaagtacaaaggagtgaggatgagaagttggggatcatgggtctctgagattagggcaccaaatcaaaagacaaggatttggttaggttcttactcaacagctgaagcagctgctagagcttacgatgttgcactcttatgtctcaaaggccctcaagccaatctcaacttccctacttcttcttcttctcatcatcttcttgataatctcttagatgaaaatacccttttgtcccccaaatccatccaaagagtagctgctcaagctgccaactcatttaaccattttgcccctacttcatcagccgtctcgtcaccgtccgatcatgatcatcaccatgatgatgggatgcaatctttgatgggatcttttgtggacaatcatgtgtctttgatggattcaacatcttcatggtatgatgatcataatgggatgttcttgtttgataatggagctccattcaattactctcctcaactaaactcgacgacgatgctcgatgaatacttctacgaagatgctgacattccgctttggagtttcaattaatccgacggtccataatacatactttaattagttttctaaatcattttttaaattcttttttatatatgtaacatatatttaccctcgtcgtaattattcatttccaagttgtttgttgcttggagagaattgacgacggatacgattatataatataattgtaagtttttatatgtagcaaactcggtacaattcggatttaatagggatctaggaagttcacatgaacaagcgactcttttttttgtcacttctttgactttttcatgtgaggtttcttttcatcaattttttttaacaatgtgtgaaaatatttctgtattgtaatgatatatttcgcacaatagttttg

SEQ ID NO: 248 - protein, 230 aa, Arabidopsis thaliana
MVKQERKIQTSSTKKEMPLSSSPSSSSSSSSSSSSSSCKNKNKKSKIKKYKGVRMRSWGSWVSEIRAPNQKTRIWLGSYSTAEAAARAYDVALLCLKGPQANLNFPTSSSSHHLLDNLLDENTLLSPKSIQRVAAQAANSFNHFAPTSSAVSSPSDHDHHHDDGMQSLMGSFVDNHVSLMDSTSSWYDDHNGMFLFDNGAPFNYSPQLNSTTMLDEYFYEDADIPLWSFN

SEQ ID NO: 249 - DNA, 939 bp, Arabidopsis thaliana
ctcatattcccaacacttgttcaagcatatctaagtcaataacaacattacaacataacatggtgaaacaagaactcaagatccaagttactacttcctcatcatcactctctcattcttcatcttcttcttcttcttcaacgtcggcactacgtcatcaatcttgtaagaacaagataaagaagtataaaggtgtgaggatgcgaagttggggatcatgggttactgaaattagggcaccaaatcaaaagacaagaatctggttaggttcttactccaccgcagaagcagctgctagggcttacgacgctgctctcttgtgtcttaagggacctaaagctaatctcaacttccctaacatcaccactacttctccttttcttatgaacatcgacgaaaagacccttttgtccccaaaatcaatccaaaaggtcgccgctcaagccgctaactcctcttctgaccattttacccctccgtccgatgaaaatgatcatgatcatgatgacggactcgatcaccatccatctgcttcttcttcagctgcatcttcaccaccagatgatgatcatcataatgatgacgatggtgatttggtatcgttgatggaatctttcgtggattacaacgaacacgtgtctctgatggatccatcgctgtatgaatttggacataatgagatcttcttcaccaacggagatccgtttgattattctccacagttacatagctcagaggcaacgatggatgacttctacgacgatgttgatattccgctatggagtttcagttaatccaacggtccatattattatactacgaaacacttttaattcacattatttcatttaatttattctttcaattcatattattcgtccttgttgtttcgttatgtattaaatatacacacactaatttaagaagatcacatggact

SEQ ID NO: 250 - protein, 244 aa, Arabidopsis thaliana
MVKQELKIQVTTSSSSLSHSSSSSSSSTSALRHQSCKNKIKKYKGVRMRSWGSWVTEIRAPNQKTRIWLGSYSTAEAAARAYDAALLCLKGPKANLNFPNITTTSPFLMNIDEKTLLSPKSIQKVAAQAANSSSDHFTPPSDENDHDHDDGLDHHPSASSSAASSPPDDDHHNDDDGDLVSLMESFVDYNEHVSLMDPSLYEFGHNEIFFTNGDPFDYSPQLHSSEATMDDFYDDVDIPLWSFS

SEQ ID NO: 251 - DNA, 720 bp, Arabidopsis thaliana
atggtgaaaacacttcaaaagacaccaaagagaatgtcatctccatcatcatcatcttcatcatcctcatcaacatcatcatcatccataaggatgaagaagtacaagggagtgagaatgagaagttggggttcatgggtttcagagatcagagctcctaatcaaaagacaaggatctggcttggttcttactcaactgctgaagccgcggctagagcctacgacgcagcactcctatgtcttaaaggatcctcagctaataatctcaacttcccagagatctcaacttctctctaccatattatcaacaatggtgataacaacaatgacatgtcccctaagtctatacaaagagtagcagctgcagctgctgctgccaacacagatccttcctcatcatcagtctctacttcatctccattgctttcctctccatctgaagatctctatgatgttgtctccatgtcacagtatgaccaacaagtctccttgtctgaatcatcatcatggtacaactgctttgatggtgatgatcagttcatgttcattaatggagtctccgcgccgtatttgacaacatcactttctgatgatttctttgaggaaggagatatcagattatggaacttctgctgattctactttcattataccttattctttgtttcaatatatatacttgagttatgtaacttatacaatgtgttatacatttttttc

SEQ ID NO: 252 - protein, 211 aa, Arabidopsis thaliana
MVKTLQKTPKRMSSPSSSSSSSSSTSSSSIRMKKYKGVRMRSWGSWVSEIRAPNQKTRIWLGSYSTAEAAARAYDAALLCLKGSSANNLNFPEISTSLYHIINNGDNNNDMSPKSIQRVAAAAAAANTDPSSSSVSTSSPLLSSPSEDLYDVVSMSQYDQQVSLSESSSWYNCFDGDDQFMFINGVSAPYLTTSLSDDFFEEGDIRLWNFC

SEQ ID NO: 253 - DNA, 960 bp, Arabidopsis thaliana
ctgctttcaatacccttacttttcagtttccacagtccctgtacttgtgcataaaactgtaaaacactactctgaaaattttgcttctgttaggatataatgccaccctctcctcctaaatctccttttattagctcttcactcaaaggagctcatgaagatcgcaaatttaaatgctataggggtgtccgaaagaggtcttggggcaaatgggtgtctgaaatcagagttccaaagactggacgacgaatatggctaggttcatacgatgctccagagaaggcagctagagcctatgatgctgctttgttctgtattaggggtgagaagggagtttacaattttcccactgataaaaagccgcagcttccagaaggttctgtccggcctctgtccaagctcgacatacagacaatagcaacaaactatgcttcatcagttgtgcatgtaccttcccatgccaccacactcccggcaacaacccaggttccctctgaagttcctgcttcctctgatgtttctgcttctactgagattacagagatggtcgatgaatattatctcccaaccgatgcaactgcagaatcaatattctcagttgaagacttacaactggacagtttcctcatgatggacattgattggataaacaatctaatctgatgtgtaacgtcacttgcagtgacatttaatatggtttaactatcagttacctgtctgcttcttgtaagggtatacttggatccttgtctttgaacttgttttatttagcatgcagtttgttgtttctgttttgcatgtgttcttccttatgagatgttggatatgaatgaaatgattaggagttggcgttcacacctaaatctttgttgcatgtttgatgcattttttcctatatcgttcacacatgatctgcctctttttctatacttctacttctacataaaccatactaggact

SEQ ID NO: 254 - protein, 187 aa, Arabidopsis thaliana
MPPSPPKSPFISSSLKGAHEDRKFKCYRGVRKRSWGKWVSEIRVPKTGRRIWLGSYDAPEKAARAYDAALFCIRGEKGVYNFPTDKKPQLPEGSVRPLSKLDIQTIATNYASSVVHVPSHATTLPATTQVPSEVPASSDVSASTEITEMVDEYYLPTDATAESIFSVEDLQLDSFLMMDIDWINNLI

SEQ ID NO: 255 - DNA, 946 bp, Arabidopsis thaliana
ctatactgtcagctccaaaacatacctgaataagtgaatatacattaaaacctaatctatcatcatatccatctctttccctctctgcatttagagatatggatgcatccccaaagtacacaggtgtacggaagaggaagtggggaaaatgggtggctgagattcgtctccccaacagccgtgacaggatctggttaggctctttcgactctgctgagaaggcggcgcgtgctttcgacgcggctctttactgtcttcgtggccccggagcacgcttcaacttccccgacaatcctccggagattcccggtggtcgttctctgacgccgcagcagattcaggtcgtagctagccgtttcgcctgcgaggaggagctactaccaccggaacaacatcatccgtcaccgccacgtggcgaccataataccgaggaagaagtgataatttcggcacgtggggaaattaatagtggtagtggtgggcctacgttagggcaagttggggaagataataacaacgagggtaatagtaatgacacgtcgtcgtattggcctttaatatgggaggaggagaattttgtaggtcctcctaactcagatcatgagttcggttttttcacagatgattcaaccaatttgtacttcccgacacaacaacaacaacaacatcagctctcgtctgatttttactatgatggagcttgtgaagatgatttctctcattacaatattaacctttggaatttctgagatccatttttttggtgatcttggaccaaatattcctatattgattaattcaatttgtggatttcgaattcgagatttcaaatgatcttgaaccagaattttcaccacccactagtagtgtgaatcatttgtttgaactttgaagcgaatcctatatgccacaatgtaagcaagcctgagtaatagcttcactactt

SEQ ID NO: 256 - protein, 216 aa, Arabidopsis thaliana
MDASPKYTGVRKRKWGKWVAEIRLPNSRDRIWLGSFDSAEKAARAFDAALYCLRGPGARFNFPDNPPEIPGGRSLTPQQIQVVASRFACEEELLPPEQHHPSPPRGDHNTEEEVIISARGEINSGSGGPTLGQVGEDNNNEGNSNDTSSYWPLIWEEENFVGPPNSDHEFGFFTDDSTNLYFPTQQQQQHQLSSDFYYDGACEDDFSHYNINLWNF

SEQ ID NO: 257 - DNA, 709 bp, Arabidopsis thaliana
atggaagggtcgtcttcttcgatgcagtcaaagtacaaaggagtgaggaagaggaaatggggaaaatgggtttcagagatcagacttcccaacagcagagaacgtatttggttgggctcttacgatactcctgagaaggcggcgcgtgctttcgacgcggctctttattgtctccgtggcaacaacgcaaagttcaatttccctgataatcctccggtgatctccggcggacgtaacttgtcgcgatctgagataagagaagctgctgcgaggttcgctaattcggcggaggatgattcaagtggcggagcaggatacgagatacggcaagaatctgcttcaacatcgatggacgttgattcggagtttttgagtatgcttccgacggttggttcgggtaacttcgcttcggagtttgggttattccctgggtttgatgatttctccgatgaatactccggtgatcgtttcagagagcagctttcgcctacacaagattattatcagcttggagaagagacttacgccgatggttccatgtttctttggaatttttgaattccattattcacaatctgaaaattttgacttgggttttttatttttttttgtagttctttacccaatttttttttgatcattgggataaagagttattcattcactatttttttcccacgtgttagatttttcagatgggaaaaggcca

SEQ ID NO: 258 - protein, 185 aa, Arabidopsis thaliana
MEGSSSSMQSKYKGVRKRKWGKWVSEIRLPNSRERIWLGSYDTPEKAARAFDAALYCLRGNNAKFNFPDNPPVISGGRNLSRSEIREAAARFANSAEDDSSGGAGYEIRQESASTSMDVDSEFLSMLPTVGSGNFASEFGLFPGFDDFSDEYSGDRFREQLSPTQDYYQLGEETYADGSMFLWNF

SEQ ID NO: 259 - DNA, 918 bp, Arabidopsis thaliana
aaccagatataacagaattaacctacacaactgaaactcgagttaagaaccggaaacagaatccaattcaaccaaaccgaatcgaaccgaaccggagtttttatccaatggtgaagcaagcgatgaaggaagaggagaagaagagaaacacggcgatgcagtcaaagtacaaaggagtgaggaagaggaaatggggaaaatgggtatcggagatcagacttccacacagcagagaacgaatttggttaggctcttacgacactcccgagaaggcggcgcgtgctttcgacgccgctcaattttgtctccgcggcggcgatgctaatttcaatttccctaataatccaccgtcgatctccgtagaaaagtcgttgacgcctccggagattcaggaagctgctgctagattcgctaacacattccaagacattgtcaagggagaagaagaatcgggtttagtacccggatccgagatccgaccagagtctccttctacatctgcatctgttgctacatcgacggtggattatgatttttcgtttttggatttgcttccgatgaatttcgggtttgattccttctccgacgacttctctggcttctccggtggtgatcgatttacagagattttacccatcgaagattacggaggagagagtttattagatgaatctttgattctttgggatttttgaattcccaaacataatatttttttagagcgaactgtgagattttccttggagtcatggagaaatctggagattttttgtaacacggagctccaatgacccgggaatttctttcgtttcggatccgaatttgatgtggatcatattcacacctatattttttcatttttttgttgtaaagaaaaatcggataagattctagtaataaatgttaaaagtccatttc

SEQ ID NO: 260 - protein, 195 aa, Arabidopsis thaliana
MVKQAMKEEEKKRNTAMQSKYKGVRKRKWGKWVSEIRLPHSRERIWLGSYDTPEKAARAFDAAQFCLRGGDANFNFPNNPPSISVEKSLTPPEIQEAAARFANTFQDIVKGEEESGLVPGSEIRPESPSTSASVATSTVDYDFSFLDLLPMNFGFDSFSDDFSGFSGGDRFTEILPIEDYGGESLLDESLILWDF

SEQ ID NO: 261 - DNA, 807 bp, Arabidopsis thaliana
aaacaacactcaaaagtctcttcttcttcttcttcttcttcacatcgatcatcatacaacaacaaaaaatggattacagagaatccaccggtgaaagtcagtcaaagtacaaaggaatccgtcgtcggaaatggggcaaatgggtatcagagattagagttccgggaactcgtgaccgtctctggttaggttcattctcaacagcagaaggtgccgccgtagcacacgacgttgctttcttctgtttacaccaacctgattctttagaatctctcaatttccctcatttgcttaatccttcactcgtttccagaacttctccgagatctatccagcaagctgcttctaacgccggcatggccattgacgccggaatcgtccacagtaccagcgtgaactctggatgcggagatacgacgacgtattacgagaatggagctgatcaagtggagccgttgaatatttcagtgtatgattatctgggcggccacgatcacgtttgatttatctcgacggtcatgatcacgtttgatcttcttttgagtaagattttgtaccataatcaaaacaggtgtggtgctaaaatcttactcaaaacaagattaggtaccacagagaaacaatcaaatggttgtgaatatacattataaggttttgattaatgtttgtttcactgatttagtgaagtttggtccattgtatacaaatctattcaagaaacctagcgcgagatcatgtttcgtgattgaagattgagatttttaagtattcgtaatatttttgtaaaatacaaatatgtttctgatc

SEQ ID NO: 262 - DNA, 582 bp, Arabidopsis thaliana
tctacacgactttattccgcttcaacgtatttatatgcaacattttccctcatgatcttataatctcatcttcatccacccaaaaacatggattcaagagacaccggagaaactgaccagagcaagtacaaaggtatccgtcgtcggaaatggggaaaatgggtatcagagattcgtgtcccgggaactcgtcaacgtctctggttaggctctttctccaccgcagaaggcgctgccgtagcccacgacgtcgctttttactgcttgcaccgaccatcttccctcgacgacgaatcttttaacttccctcacttacttacaacctccctcgcctccaatatatctcctaagtccatccaaaaagctgcttccgacgccggcatggccgtggacgccggattccatggtgctgtgtctgggagtggtggttgtgaagagagatcttccatggcgaatatggaggaggaggacaaacttagtatctccgtgtatgattatcttgaagacgatctcgtttgatctatacgagtacgtttttagcagttaatataggatgtgcaaagggttaggatctgtttactt

SEQ ID NO: 263 - protein, 144 aa, Arabidopsis thaliana
MDYRESTGESQSKYKGIRRRKWGKWVSEIRVPGTRDRLWLGSFSTAEGAAVAHDVAFFCLHQPDSLESLNFPHLLNPSLVSRTSPRSIQQAASNAGMAIDAGIVHSTSVNSGCGDTTTYYENGADQVEPLNISVYDYLGGHDHV

SEQ ID NO: 264 - protein, 143 aa, Arabidopsis thaliana
MDSRDTGETDQSKYKGIRRRKWGKWVSEIRVPGTRQRLWLGSFSTAEGAAVAHDVAFYCLHRPSSLDDESFNFPHLLTTSLASNISPKSIQKAASDAGMAVDAGFHGAVSGSGGCEERSSMANMEEEDKLSISVYDYLEDDLV

SEQ ID NO: 265 - protein, 41 aa, Artificial sequence
  Motif 25: AP2/ERF domain
  misc_feature (2)..(2): Xaa can be any naturally occurring amino acid
  misc_feature (4)..(4): Xaa can be any naturally occurring amino acid
  misc_feature (6)..(6): Xaa can be any naturally occurring amino acid
  misc_feature (9)..(9): Xaa can be any naturally occurring amino acid
  misc_feature (12)..(12): Xaa can be any naturally occurring amino acid
  misc_feature (16)..(16): Xaa can be any naturally occurring amino acid
  misc_feature (18)..(21): Xaa can be any naturally occurring amino acid
  misc_feature (23)..(23): Xaa can be any naturally occurring amino acid
  misc_feature (28)..(33): Xaa can be any naturally occurring amino acid
  misc_feature (36)..(36): Xaa can be any naturally occurring amino acid
  misc_feature (38)..(38): Xaa can be any naturally occurring amino acid
  misc_feature (40)..(40): Xaa can be any naturally occurring amino acid
GXRXRXWGXWVXEIRXPXXXXRXWLGSXXXXXXAAXAXDXA

SEQ ID NO: 266 - protein, 5 aa, Artificial sequence
  Motif 26: CMII-1
  misc_feature (2)..(4): Xaa can be any naturally occurring amino acid
IXXXA

SEQ ID NO: 267 - protein, 6 aa, Artificial sequence
  Motif 27: CMII-2
  misc_feature (2)..(2): Xaa can be any naturally occurring amino acid
  misc_feature (4)..(5): Xaa can be any naturally occurring amino acid
DXNXXP

SEQ ID NO: 268 - protein, 4 aa, Artificial sequence
  Motif 28: CMII-3
  misc_feature (3)..(3): Xaa can be any naturally occurring amino acid
LWXF

SEQ ID NO: 269 - DNA, 2194 bp, Oryza sativa; identical to SEQ ID NO: 91

SEQ ID NO: 270 - DNA, 53 bp, Artificial sequence
  primer: prm14304
ggggacaagtttgtacaaaaaagcaggcttaaacaatggacggtggaagagga

SEQ ID NO: 271 - DNA, 51 bp, Artificial sequence
  primer: prm14305
ggggaccactttgtacaagaaagctgggttccaatatcaattaacatccca

SEQ ID NO: 272 - DNA, 2568 bp, Arabidopsis thaliana
atggattataataggcaacgactacttgtagtggctaacaggctcccagtttctgccgtgagaagaggtgaagattcatggtctcttgagatcagtgctggtggtctagtcagtgctctcttaggtgtaaaggaatttgaggccagatggataggatgggctggagttaatgtgcctgatgaggttggacagaaggcacttagcaaagctttggctgagaagaggtgtattcccgtgttccttgatgaagagattgttcatcagtactataatggttactgcaacaatattctgtggcctctgtttcactaccttggacttccgcaagaagatcggcttgccacaaccagaagctttcagtcccaatttgctgcatacaagaaggcaaaccaaatgttcgctgatgttgtaaatgagcactatgaagagggagatgtcgtctggtgccatgactatcatcttatgttccttcctaaatgccttaaggagtacaacagtaagatgaaagttggatggtttctccatacaccattcccttcgtctgagatacacaggacacttccatcacgatcagagctccttcgctcagttcttgctgctgatttagttggcttccatacatatgactatgcaaggcactttgtgagtgcgtgcactcgtattcttggacttgaaggaacacctgagggagttgaggatcaaggcaggctcactcgtgtagctgcttttccaattggcatagattctgatcggtttatacgagcacttgaggtccccgaagtcatacaacacatgaaggaattgaaagaaagatttgctggcagaaaggtgatgttaggtgttgatcgtcttgacatgatcaaagggattccacaaaagattctggcattcgaaaaatttctcgaggaaaatgcaaactggcgtgataaagtggtcttattgcaaattgcggtgccaacaagaactgacgttcctgagtatcaaaaactcacaagccaagttcatgaaattgttggacgcattaatggtcgttttgggacactgactgcagttccaatacatcatctggatcggtctctggactttcatgctttatgtgcactttatgccgtcacagatgttgcgcttgtaacatctttgagagatgggatgaatcttgtcagttatgagtttgttgcttgccaagaggccaaaaagggcgtcctcattctcagtggatttgcaggtgctgcacagtctctgggtgctggagctattcttgtgaatccttggaacatcacagaagttgctgcctccattggacaagccctaaacatgacagctgaagaaagagagaaaagacatcgccataattttcatcatgtcaaaactcacactgctcaagaatgggctgaaacttttgtcagtgaactaaatgacactgtaattgaggcgcaactacgaattagtaaagtcccaccagagcttccacagcatgatgcaattcaacggtattcaaagtccaacaacaggcttctaatcctgggtttcaatgcaacattgactgaaccagtggataatcaagggagaagaggtgatcaaataaaggagatggatcttaatctacaccctgagcttaaagggcccttaaaggcattatgcagtgatccaagtacaaccatagttgttctgagcggaagcagcagaagtgttttggacaaaaactttggagagtatgacatgtggctggcagcagaaaatgggatgttcctaaggcttacgaatggagagtggatgactacaatgccagaacacttgaacatggaatgggttgatagcgtaaagcatgttttcaagtacttcactgagagaactcccaggtcacactttgaaactcgcgatacttcgcttatttggaactacaaatatgcagatatcgaattcgggagacttcaagcaagagatttgttacaacacttatggacaggtccaatctctaatgcatcagttgatgttgtccaaggaagccgctctgtggaagtccgtgcagttggtgtcacaaagggagctgcaattgatcgtattctaggagagatagtgcatagcaagtcgatgactacaccaatcgattacgtcttgtgcattggtcatttcttggggaaggacgaagatgtttacactttcttcgaaccagaacttccatccgacatgccagccattgcacgatccagaccatcatctgacagtggagccaagtcatcatcaggagaccgaagaccaccttcaaagtcgacacataacaacaacaaaagtggatcaaaatcctcatcatcctctaactctaacaacaacaacaagtcctcacagagatctcttcagtcagagagaaaaagtggatccaaccatagcttaggaaactcaagacgtccttcaccagagaagatctcatggaatgtgcttgacctcaaaggagagaactacttctcttgcgctgtgggtcgtactcgcaccaatgctagatatctccttggctcacctgacgacgtcgtttgcttccttgagaagctcgctgacaccacttcctcacct

SEQ ID NO: 273 - protein, 856 aa, Arabidopsis thaliana
MDYNRQRLLVVANRLPVSAVRRGEDSWSLEISAGGLVSALLGVKEFEARWIGWAGVNVPDEVGQKALSKALAEKRCIPVFLDEEIVHQYYNGYCNNILWPLFHYLGLPQEDRLATTRSFQSQFAAYKKANQMFADVVNEHYEEGDVVWCHDYHLMFLPKCLKEYNSKMKVGWFLHTPFPSSEIHRTLPSRSELLRSVLAADLVGFHTYDYARHFVSACTRILGLEGTPEGVEDQGRLTRVAAFPIGIDSDRFIRALEVPEVIQHMKELKERFAGRKVMLGVDRLDMIKGIPQKILAFEKFLEENANWRDKVVLLQIAVPTRTDVPEYQKLTSQVHEIVGRINGRFGTLTAVPIHHLDRSLDFHALCALYAVTDVALVTSLRDGMNLVSYEFVACQEAKKGVLILSGFAGAAQSLGAGAILVNPWNITEVAASIGQALNMTAEEREKRHRHNFHHVKTHTAQEWAETFVSELNDTVIEAQLRISKVPPELPQHDAIQRYSKSNNRLLILGFNATLTEPVDNQGRRGDQIKEMDLNLHPELKGPLKALCSDPSTTIVVLSGSSRSVLDKNFGEYDMWLAAENGMFLRLTNGEWMTTMPEHLNMEWVDSVKHVFKYFTERTPRSHFETRDTSLIWNYKYADIEFGRLQARDLLQHLWTGPISNASVDVVQGSRSVEVRAVGVTKGAAIDRILGEIVHSKSMTTPIDYVLCIGHFLGKDEDVYTFFEPELPSDMPAIARSRPSSDSGAKSSSGDRRPPSKSTHNNNKSGSKSSSSSNSNNNNKSSQRSLQSERKSGSNHSLGNSRRPSPEKISWNVLDLKGENYFSCAVGRTRTNARYLLGSPDDVVCFLEKLADTTSSP

SEQ ID NO: 274 - DNA, 2562 bp, Arabidopsis thaliana
tataataggcaacgactacttgtagtggctaacaggctcccagtttctgccgtgagaagaggtgaagattcatggtctcttgagatcagtgctggtggtctagtcagtgctctcttaggtgtaaaggaatttgaggccagatggataggatgggctggagttaatgtgcctgatgaggttggacagaaggcacttagcaaagctttggctgagaagaggtgtattcccgtgttccttgatgaagagattgttcatcagtactataatggttactgcaacaatattctgtggcctctgtttcactaccttggacttccgcaagaagatcggcttgccacaaccagaagctttcagtcccaatttgctgcatacaagaaggcaaaccaaatgttcgctgatgttgtaaatgagcactatgaagagggagatgtcgtctggtgccatgactatcatcttatgttccttcctaaatgccttaaggagtacaacagtaagatgaaagttggatggtttctccatacaccattcccttcgtctgagatacacaggacacttccatcacgatcagagctccttcgctcagttcttgctgctgatttagttggcttccatacatatgactatgcaaggcactttgtgagtgcgtgcactcgtattcttggacttgaaggaacacctgagggagttgaggatcaaggcaggctcactcgtgtagctgcttttccaattggcatagattctgatcggtttatacgagcacttgaggtccccgaagtcatacaacacatgaaggaattgaaagaaagatttgctggcagaaaggtgatgttaggtgttgatcgtcttgacatgatcaaagggattccacaaaagattctggcattcgaaaaatttctcgaggaaaatgcaaactggcgtgataaagtggtcttattgcaaattgcggtgccaacaagaactgacgttcctgagtatcaaaaactcacaagccaagttcatgaaattgttggacgcattaatggtcgttttgggacactgactgcagttccaatacatcatctggatcggtctctggactttcatgctttatgtgcactttatgccgtcacagatgttgcgcttgtaacatctttgagagatgggatgaatcttgtcagttatgagtttgttgcttgccaagaggccaaaaagggcgtcctcattctcagtggatttgcaggtgctgcacagtctctgggtgctggagctattcttgtgaatccttggaacatcacagaagttgctgcctccattggacaagccctaaacatgacagctgaagaaagagagaaaagacatcgccataattttcatcatgtcaaaactcacactgctcaagaatgggctgaaacttttgtcagtgaactaaatgacactgtaattgaggcgcaactacgaattagtaaagtcccaccagagcttccacagcatgatgcaattcaacggtattcaaagtccaacaacaggcttctaatcctgggtttcaatgcaacattgactgaaccagtggataatcaagggagaagaggtgatcaaataaaggagatggatcttaatctacaccctgagcttaaagggcccttaaaggcattatgcagtgatccaagtacaaccatagttgttctgagcggaagcagcagaagtgttttggacaaaaactttggagagtatgacatgtggctggcagcagaaaatgggatgttcctaaggcttacgaatggagagtggatgactacaatgccagaacacttgaacatggaatgggttgatagcgtaaagcatgttttcaagtacttcactgagagaactcccaggtcacactttgaaactcgcgatacttcgcttatttggaactacaaatatgcagatatcgaattcgggagacttcaagcaagagatttgttacaacacttatggacaggtccaatctctaatgcatcagttgatgttgtccaaggaagccgctctgtggaagtccgtgcagttggtgtcacaaagggagctgcaattgatcgtattctaggagagatagtgcatagcaagtcgatgactacaccaatcgattacgtcttgtgcattggtcatttcttggggaaggacgaagatgtttacactttcttcgaaccagaacttccatccgacatgccagccattgcacgatccagaccatcatctgacagtggagccaagtcatcatcaggagaccgaagaccaccttcaaagtcgacacataacaacaacaaaagtggatcaaaatcctcatcatcctctaactctaacaacaacaacaagtcctcacagagatctcttcagtcagagagaaaaagtggatccaaccatagcttaggaaactcaagacgtccttcaccagagaagatctcatggaatgtgcttgacctcaaaggagagaactacttctcttgcgctgtgggtcgtactcgcaccaatgctagatatctccttggctcacctgacgacgtcgtttgcttccttgagaagctcgctgacaccacttcctcacct

SEQ ID NO: 275 - protein, 854 aa, Arabidopsis thaliana
YNRQRLLVVANRLPVSAVRRGEDSWSLEISAGGLVSALLGVKEFEARWIGWAGVNVPDEVGQKALSKALAEKRCIPVFLDEEIVHQYYNGYCNNILWPLFHYLGLPQEDRLATTRSFQSQFAAYKKANQMFADVVNEHYEEGDVVWCHDYHLMFLPKCLKEYNSKMKVGWFLHTPFPSSEIHRTLPSRSELLRSVLAADLVGFHTYDYARHFVSACTRILGLEGTPEGVEDQGRLTRVAAFPIGIDSDRFIRALEVPEVIQHMKELKERFAGRKVMLGVDRLDMIKGIPQKILAFEKFLEENANWRDKVVLLQIAVPTRTDVPEYQKLTSQVHEIVGRINGRFGTLTAVPIHHLDRSLDFHALCALYAVTDVALVTSLRDGMNLVSYEFVACQEAKKGVLILSGFAGAAQSLGAGAILVNPWNITEVAASIGQALNMTAEEREKRHRHNFHHVKTHTAQEWAETFVSELNDTVIEAQLRISKVPPELPQHDAIQRYSKSNNRLLILGFNATLTEPVDNQGRRGDQIKEMDLNLHPELKGPLKALCSDPSTTIVVLSGSSRSVLDKNFGEYDMWLAAENGMFLRLTNGEWMTTMPEHLNMEWVDSVKHVFKYFTERTPRSHFETRDTSLIWNYKYADIEFGRLQARDLLQHLWTGPISNASVDVVQGSRSVEVRAVGVTKGAAIDRILGEIVHSKSMTTPIDYVLCIGHFLGKDEDVYTFFEPELPSDMPAIARSRPSSDSGAKSSSGDRRPPSKSTHNNNKSGSKSSSSSNSNNNNKSSQRSLQSERKSGSNHSLGNSRRPSPEKISWNVLDLKGENYFSCAVGRTRTNARYLLGSPDDVVCFLEKLADTTSSP

SEQ ID NO: 276 - DNA, 2466 bp, Arabidopsis thaliana
atggattatgatgatgcacgtggtgaaaggccaagattgcttgtggtggctaacaggcttccggtttctgcaaagaggaccggggaaaattcttggtctctggaaatgagtcctggtggtttagtcagtggtcttctaggtataacatctcaatttgataccaaatgggttggatggcccggagttgatgtgcatgatgaaattgaaaaaaatgcactcactgaatctctagccgaaatgaagtgtatccctgtgttccttaatggggtttttgatcagtactacaatggttattgcaatggtatcttgtggccaattcttcatcacatgggacttccacaagaagatcagcatgacacaaaccaaactttcgaaacacaatatgatgcatacaagaaagcaaatcgaatgtttcttgatgtcataatagacaactatgaagaaggagatattgtttggtgtcatgactatcatctcatgtttcttcctcaataccttaaagagtacaacaacaaaatcaaagttggatggtttctccattcaccatttccttcttctgaggtctacaaaacattgccctcgcggtcagagcttcttcgtgcgattcttgcagctgatttacttggcttccatacatatgattttgcaagacatttcttgagtacatgcactcgaattcttggagttgaaggaacacatgaaggagttgtgtatcaaggcagagtcactcgagtagctgtttttcccattggaatagatcctgatcggtttataagaacatgtaagctccctgaagtcacacagcaaatgaatgagcttcaagagaagtttgctggcaaaaaggtgatattaggtgttgatcgtcttgatatgatcaaagggatcccacaaaagtatcttgcatttgagaagtttctagaagaaaatccatattggcgtgataaagttgtgctagtgcaaattgcagtgccaacaagaaatgatgtccctgaatatcgaaagctcaaaagccaagtccatggactcgttggtcgcataaacggtcgttttggttctgtctcttctcttccaatccatcatctggattgttctgttgacttcaactacttatgtgcaatatacgcaattgcagatgtaatgcttgtaacatctttgagagatggaatgaatcttgttagttatgaatttgttgcttgtcaagaagccaaaaagggggttcttgttctcagtgagtttgcaggtgctggccagtctcttggtgttggagctcttattgtgaatccttgggatgttacagaagtttcttctgccattaaagaagctctaaatatgccagctgaagaaagagaaacaagacacagatctaattttcagtatgtgtgtactcattctgctgaaaaatggggattagatttcatgagtgaactcaatggcattattcctgaatccgagatgcaaatgaggaaaatcccacttcaacttccagaacaagatgtgattcaacaatattcgcaatctaacaatagactaataatattgggtttctttggaacactcgcagagccaatgaatagtggaactaaggaaatggatcttaaactaaacccagagctaaaaggaacactgaaagcattgtgcaatgatccaaaaacaacagtagttgtattgagtagaagtggcaaaaacatattaaacaagaattttggagagtctaatatatggctggctgcggaaaatggaatgttcgaaaagcagacaactggagaatgggtgacaaatatgcctcaaaacgtgaaccttgattgggtcgatggtgtaaagaatgtttttaagtatttcactgatcgaactccaagatcgtacttcgaagcaagcgagacttcgctcgtatggaattatgaatatgcagatgttgaatttgggagagcacaagcaagagacttgttacaatacctatgggcaggaccaatctctaatgcatcagttgatgttgttcgaggaaaccattctgttgaagtccatgccattggtgagactaagggggcagcaattggtcgtattttgggagaaatagtgcacagaaaatctatgaccacaccgattgattttgtcttttgtagtggttacttcttggagaaggacgaagacatttacacattcttcgaatcaaaaatcttgtcgtccaagtcaccgaacggtctcgacctcaagaaagagaattacttctctgcagccattggacaagctcgcacaaaagctcgctatgtcatagactcagctcacggtgttgtagatttgctccacaagcttgcagttgttgcagatacaacaatgactgactcattttctgatagcgaaatatatgagcctcgcgatgcaaatgcaaatgaaaattcgaaacgctggatcaattctgtcagaagaaggaaagtggaaattggagacactgggcaaatcggcatgtaa

SEQ ID NO: 277 - protein, 821 aa, Arabidopsis thaliana
MDYDDARGERPRLLVVANRLPVSAKRTGENSWSLEMSPGGLVSGLLGITSQFDTKWVGWPGVDVHDEIEKNALTESLAEMKCIPVFLNGVFDQYYNGYCNGILWPILHHMGLPQEDQHDTNQTFETQYDAYKKANRMFLDVIIDNYEEGDIVWCHDYHLMFLPQYLKEYNNKIKVGWFLHSPFPSSEVYKTLPSRSELLRAILAADLLGFHTYDFARHFLSTCTRILGVEGTHEGVVYQGRVTRVAVFPIGIDPDRFIRTCKLPEVTQQMNELQEKFAGKKVILGVDRLDMIKGIPQKYLAFEKFLEENPYWRDKVVLVQIAVPTRNDVPEYRKLKSQVHGLVGRINGRFGSVSSLPIHHLDCSVDFNYLCAIYAIADVMLVTSLRDGMNLVSYEFVACQEAKKGVLVLSEFAGAGQSLGVGALIVNPWDVTEVSSAIKEALNMPAEERETRHRSNFQYVCTHSAEKWGLDFMSELNGIIPESEMQMRKIPLQLPEQDVIQQYSQSNNRLIILGFFGTLAEPMNSGTKEMDLKLNPELKGTLKALCNDPKTTVVVLSRSGKNILNKNFGESNIWLAAENGMFEKQTTGEWVTNMPQNVNLDWVDGVKNVFKYFTDRTPRSYFEASETSLVWNYEYADVEFGRAQARDLLQYLWAGPISNASVDVVRGNHSVEVHAIGETKGAAIGRILGEIVHRKSMTTPIDFVFCSGYFLEKDEDIYTFFESKILSSKSPNGLDLKKENYFSAAIGQARTKARYVIDSAHGVVDLLHKLAVVADTTMTDSFSDSEIYEPRDANANENSKRWINSVRRRKVEIGDTGQIGM

SEQ ID NO: 278 - DNA, 2193 bp, Arabidopsis thaliana
atgggttatgataatgtatgtggtgaaaggcaaacactgcttgtggtggctaaccggcttccagcttctgcaaagagaaccggggaacattcttggtctctggaaatgagtcctggtggcaaatttaatcttctagttgaaaaagatgcagtctctaaatctctggctgaaatgaagtgtatccctgtattccttaatgaggtttttgatcaatactacaatggttatagcaatggtatattgtggccaattcttcatcacatgggacttccacaagaatatgatcatgacacaatcaaaactttcgaaacccaatatgatgcatacaagaaagcaaatcgaatgtttcttgatgtcataaaagagaattataaagatggagatattgtttggtgccaagattatcatctcatgtttcttcctcaatatcttaaagagtacaacaataaaatcaaagttggatggtttctccattcaccatttccttcttccgagatttataaaacattgccctcacgatcagagcttcttcgttcggttcttgcagctgatttaattagttttcacacatatgattttgcaagacatttcgtgaatacatgcacccgaattcttggagttgaaggaacacatgaaggagttgtgtatcaaggaagagtcactcgagtggttgttcttcccatgggaatatatccaaatcggtttataaaaacatgtaagctccctgaagtaattcaacaaatgaatgagcttaaagatagattttctggcaaaaaggtgatattaggtgttgatcgtcttgatatgatcaaagggattccacaaaagtatcttggatttgagaaatttctggatgaaaatcctaattggcgcgataaaattgtgctagtgcaaattgcagtaccaacaagaaatgaagtccctgaatatcaaaagctcaaaaaccaagttcatagactggttggacgcataaacggtcgttttggttctgtctcttctcttccaattcaccacatggattgttctgttgactccaattacttatgcgcactttatgcgatttcagatgtaatgcttgtaacatctttgagagacggattgaatcttgttagtcatgaatttgttgcttgccaagaggccaaaagaggggttcttattctcagtgagtttgcaggtgctggacagtctcttggtgctggagctctacttgtgaatccttggaatgttacagaagtttcttctgcaattaaaaaagctctaaatatgccatatgaggaaagagaaacaagacacagagttaattttaagtatgtaaaaactcattctgctgaaaaatgggggtttgatttcttgagtgaactcaatgacgctttcgatgaatccgagttgcaaattaggaaaattccacatgaacttccacaacaagatgtgatacaacgatattcgttgtcgaacaatagactgataatcttgaactttggagagtataagatatggttggctgcggaaaatggaatgttcctaaagcatactactgaagaatgggtgacaaatatgcctcaaaacatgaaccttgattgggttgatggtctcaagaatgtttttaagtacttcactgatcgaactccaagatcgttcttcgaagcaagcaagacttcgcttgtatggaattacgaatatgcagatgttgaatttgggagagcacaagcaagagacttgttacaatacttatgggcaggaccaatctctaatgcatcagctgaagttgttcgaggaaaatattctgttgaagtccatgccattggtgtgactaaggaaccagaaattggtcatattttgggagaaatagtgcacaaaaaagctatgactacaccgattgattatgtattttgcagtggttacttcttggagaaggacgaagacatctatacattcttcgaatcagaaatcttgtcgcccaagttatctcatgaaacaagatcgaagtcttcttcaagtaaccactccctagagaagaaggtttcattgaacgttcttgacctcaagcaagagaattacttctctacagccataggacaagctcgcacaaaagctcgctatgtcgttgactcatctcacaatgttgtgaatttactccacaagcttgcagtagcaaatacaacaacaacaagtgtcaagaagccaaacgtttaa

SEQ ID NO: 279 - protein, 730 aa, Arabidopsis thaliana
MGYDNVCGERQTLLVVANRLPASAKRTGEHSWSLEMSPGGKFNLLVEKDAVSKSLAEMKCIPVFLNEVFDQYYNGYSNGILWPILHHMGLPQEYDHDTIKTFETQYDAYKKANRMFLDVIKENYKDGDIVWCQDYHLMFLPQYLKEYNNKIKVGWFLHSPFPSSEIYKTLPSRSELLRSVLAADLISFHTYDFARHFVNTCTRILGVEGTHEGVVYQGRVTRVVVLPMGIYPNRFIKTCKLPEVIQQMNELKDRFSGKKVILGVDRLDMIKGIPQKYLGFEKFLDENPNWRDKIVLVQIAVPTRNEVPEYQKLKNQVHRLVGRINGRFGSVSSLPIHHMDCSVDSNYLCALYAISDVMLVTSLRDGLNLVSHEFVACQEAKRGVLILSEFAGAGQSLGAGALLVNPWNVTEVSSAIKKALNMPYEERETRHRVNFKYVKTHSAEKWGFDFLSELNDAFDESELQIRKIPHELPQQDVIQRYSLSNNRLIILNFGEYKIWLAAENGMFLKHTTEEWVTNMPQNMNLDWVDGLKNVFKYFTDRTPRSFFEASKTSLVWNYEYADVEFGRAQARDLLQYLWAGPISNASAEVVRGKYSVEVHAIGVTKEPEIGHILGEIVHKKAMTTPIDYVFCSGYFLEKDEDIYTFFESEILSPKLSHETRSKSSSSNHSLEKKVSLNVLDLKQENYFSTAIGQARTKARYVVDSSHNVVNLLHKLAVANTTTTSVKKPNV

SEQ ID NO: 280 - DNA, 2829 bp, Arabidopsis thaliana
atgcctggaaataagtacaactgcagttcttctcatatcccactctctcgaacagaacgcctcttgagagatagagagcttagagagaagaggaagagcaaccgagctcgtaatcctaatgacgttgctggcagttccgagaactctgagaatgacttgcgtttagaaggtgacagttcaaggcagtatgttgaacagtacttggaaggggctgctgctgcaatggcgcacgatgatgcgtgtgagaggcaagaagttaggccttataataggcaacgactacttgtagtggctaacaggctcccagtttctgccgtgagaagaggtgaagattcatggtctcttgagatcagtgctggtggtctagtcagtgctctcttaggtgtaaaggaatttgaggccagatggataggatgggctggagttaatgtgcctgatgaggttggacagaaggcacttagcaaagctttggctgagaagaggtgtattcccgtgttccttgatgaagagattgttcatcagtactataatggttactgcaacaatattctgtggcctctgtttcactaccttggacttccgcaagaagatcggcttgccacaaccagaagctttcagtcccaatttgctgcatacaagaaggcaaaccaaatgttcgctgatgttgtaaatgagcactatgaagagggagatgtcgtctggtgccatgactatcatcttatgttccttcctaaatgccttaaggagtacaacagtaagatgaaagttggatggtttctccatacaccattcccttcgtctgagatacacaggacacttccatcacgatcagagctccttcgctcagttcttgctgctgatttagttggcttccatacatatgactatgcaaggcactttgtgagtgcgtgcactcgtattcttggacttgaaggaacacctgagggagttgaggatcaaggcaggctcactcgtgtagctgcttttccaattggcatagattctgatcggtttatacgagcacttgaggtccccgaagtcatacaacacatgaaggaattgaaagaaagatttgctggcagaaaggtgatgttaggtgttgatcgtcttgacatgatcaaagggattccacaaaagattctggcattcgaaaaatttctcgaggaaaatgcaaactggcgtgataaagtggtcttattgcaaattgcggtgccaacaagaactgacgttcctgagtatcaaaaactcacaagccaagttcatgaaattgttggacgcattaatggtcgttttgggacactgactgcagttccaatacatcatctggatcggtctctggactttcatgctttatgtgcactttatgccgtcacagatgttgcgcttgtaacatctttgagagatgggatgaatcttgtcagttatgagtttgttgcttgccaagaggccaaaaagggcgtcctcattctcagtgaatttgcaggtgctgcacagtctctgggtgctggagctattcttgtgaatccttggaacatcacagaagttgctgcctccattggacaagccctaaacatgacagctgaagaaagagagaaaagacatcgccataattttcatcatgtcaaaactcacactgctcaagaatgggctgaaacttttgtcagtgaactaaatgacactgtaattgaggcgcaactacgaattagtaaagtcccaccagagcttccacagcatgatgcaattcaacggtattcaaagtccaacaacaggcttctaatcctgggtttcaatgcaacattgactgaaccagtggataatcaagggagaagaggtgatcaaataaaggagatggatcttaatctacaccctgagcttaaagggcccttaaaggcattatgcagtgatccaagtacaaccatagttgttctgagcggaagcagcagaagtgttttggacaaaaactttggagagtatgacatgtggctggcagcagaaaatgggatgttcctaaggcttacgaatggagagtggatgactacaatgccagaacacttgaacatggaatgggttgatagcgtaaagcatgttttcaagtacttcactgagagaactcccaggtcacactttgaaactcgcgatacttcgcttatttggaactacaaatatgcagatatcgaattcgggagacttcaagcaagagatttgttacaacacttatggacaggtccaatctctaatgcatcagttgatgttgtccaaggaagccgctctgtggaagtccgtgcagttggtgtcacaaagggagctgcaattgatcgtattctaggagagatagtgcatagcaagtcgatgactacaccaatcgattacgtcttgtgcattggtcatttcttggggaaggacgaagatgtttacactttcttcgaaccagaacttccatccgacatgccagccattgcacgatccagaccatcatctgacagtggagccaagtcatcatcaggagaccgaagaccaccttcaaagtcgacacataacaacaacaaaagtggatcaaaatcctcatcatcctctaactctaacaacaacaacaagtcctcacagagatctcttcagtcagagagaaaaagtggatccaaccatagcttaggaaactcaagacgtccttcaccagagaagatctcatggaatgtgcttgacctcaaaggagagaactacttctcttgcgctgtgggtcgtactcgcaccaatgctagatatctccttggctcacctgacgacgtcgtttgcttccttgagaagctcgctgacaccacttcctcaccttaa

SEQ ID NO: 281 - protein, 942 aa, Arabidopsis thaliana
MPGNKYNCSSSHIPLSRTERLLRDRELREKRKSNRARNPNDVAGSSENSENDLRLEGDSSRQYVEQYLEGAAAAMAHDDACERQEVRPYNRQRLLVVANRLPVSAVRRGEDSWSLEISAGGLVSALLGVKEFEARWIGWAGVNVPDEVGQKALSKALAEKRCIPVFLDEEIVHQYYNGYCNNILWPLFHYLGLPQEDRLATTRSFQSQFAAYKKANQMFADVVNEHYEEGDVVWCHDYHLMFLPKCLKEYNSKMKVGWFLHTPFPSSEIHRTLPSRSELLRSVLAADLVGFHTYDYARHFVSACTRILGLEGTPEGVEDQGRLTRVAAFPIGIDSDRFIRALEVPEVIQHMKELKERFAGRKVMLGVDRLDMIKGIPQKILAFEKFLEENANWRDKVVLLQIAVPTRTDVPEYQKLTSQVHEIVGRINGRFGTLTAVPIHHLDRSLDFHALCALYAVTDVALVTSLRDGMNLVSYEFVACQEAKKGVLILSEFAGAAQSLGAGAILVNPWNITEVAASIGQALNMTAEEREKRHRHNFHHVKTHTAQEWAETFVSELNDTVIEAQLRISKVPPELPQHDAIQRYSKSNNRLLILGFNATLTEPVDNQGRRGDQIKEMDLNLHPELKGPLKALCSDPSTTIVVLSGSSRSVLDKNFGEYDMWLAAENGMFLRLTNGEWMTTMPEHLNMEWVDSVKHVFKYFTERTPRSHFETRDTSLIWNYKYADIEFGRLQARDLLQHLWTGPISNASVDVVQGSRSVEVRAVGVTKGAAIDRILGEIVHSKSMTTPIDYVLCIGHFLGKDEDVYTFFEPELPSDMPAIARSRPSSDSGAKSSSGDRRPPSKSTHNNNKSGSKSSSSSNSNNNNKSSQRSLQSERKSGSNHSLGNSRRPSPEKISWNVLDLKGENYFSCAVGRTRTNARYLLGSPDDVVCFLEKLADTTSSP

SEQ ID NO: 282 - DNA, 2388 bp, Arabidopsis thaliana
atggcaaggccacgactgcttgtagtgtcgatgtcgcttccggtcactgcaaagaggactggagaagagtcttggtctttcacgatgagtcctggtggtctagttagtgctcttctaggtttgaaagaatttgagaccaaatggattggatggcctggagtagatgttcatgatgcgattggcaaaaagacactctccattaccctagctgaaaagggatgtatcccagtgtttttggaagaagtgtgtgatcaatactataatggctactgcaacaatattctgtggccgatttttcactacttgggaacgccaccagaatatcgtaacgatgcaaccataacataccagtcacagtatgaagcatacaagaaagcaaatcaaattttctttgatgttgtcaaagagcactatgaagaaggagatgtggtttggtgccatgattatcatgttatgcttcttcctcaatatcttaaggaatacaacagtaagatgaaagttggatggtttctccatacaccatttccttcttccgagatgtacaaaacattgccctcgcgatccgatctgcttcgttctgttcttactgctgatttagttggtttccatacctatgacttcgcaagacattttttgaatgcatgcatgtgtattcttggagtcgaagcaacatctgaaggaattgtggatcagggcaaagtcactcgagtagctgtttttcccattgggatagaacctgagaggtttataaacacaagtgaactctctgaagttgttcaatacatgaagaagttcaaaaacgattttggtgggagaaagttgatattaggtgttgatcgtctcgatacgatcaaagggattccacaaaaatatcaggcatttgagaagttcttagaggaaaatgcagagtggcgtggtaaagtcatgttacttcagattgcagtgccaacaaggaacggtattggtgaatatcaaaagatcaaagaccaatgtcattaccatgttggacgaattaatggtcgttttggttccatctcttctgttccaataattcacctggattgttctattgactttaatcaattatgcgcactttatgccatcacagatgtattacttgtaacatctctgagagatggaatgaaccttgtgagttctgaattcattgcctgccaaaaagcagaaaaaggggttctcattctaagcgagtttgcaggtgctggacagtcacttggtgccggagctattttagtgaatccttggaacattaaagaagtttcttctgccattggagaagctctaaatatgtcacatgaagaaaaggagagaaaacataaaatcaattttcagtatgtgaaaactcactccactcagcagtgggcagatgatttcatgaaattgactcttacaaacattttatgcagtaaacttattgagattacaaccagcgcggagctaggagctggattagccgccacacttgaacttccagaacatgatgtgattcaacaatactcaaagtctaacaatagactgctgattcttggattctatggaacgctcactcagccgatgaaaaatcaagagagaagaggcgacggaatgaatcttgaactgcatccacagctaaaagagagactcaaagaattatgcagtgatccaaaaacaacagtagttgtcctgagtagaagtgaaaaatgcatattggataaaaactttggagaatataacatgtggttggctgctgaaaatgggatgtttctaaggcatacaagtggagaatgggtgacaagaattccagaacacatgaatttggaatggattgatggtgttaagcatgttttcaagtacttcactgaaagaactccaggatcatatctcgaaacaagcgaggcttcgcttgtatggaactacgaaaatgcagatgctgaattcgggagagctcaagcaagagacatgttacaacacttgtgggcaggaccaatctctaatgcctcagtggatgttgttagaggaggccaatctgttgaagtccatgccgttggtgtgacaaagggaagtgcaatggagcgtattctcggagaaatagtgcataacaagtcaatggctacaccaattgactatgtcttgtgcattggttgtttcttggggaaagacgaagacgtttacacattcttcgagccagagttgaccaagaaagccaagtcgctttcttcttcaggtagtgactcccccaagaaggtatcatcgaccattgttgacctcaagggagagaattacttctccgtagctattggacaaacgcacacaaaggctcgctatttccttgactcatctgatgacgttgtgaaacttattggcaagctttgcacacacaacaatgcttga

SEQ ID NO: 283 - protein, 795 aa, Arabidopsis thaliana
MARPRLLVVSMSLPVTAKRTGEESWSFTMSPGGLVSALLGLKEFETKWIGWPGVDVHDAIGKKTLSITLAEKGCIPVFLEEVCDQYYNGYCNNILWPIFHYLGTPPEYRNDATITYQSQYEAYKKANQIFFDVVKEHYEEGDVVWCHDYHVMLLPQYLKEYNSKMKVGWFLHTPFPSSEMYKTLPSRSDLLRSVLTADLVGFHTYDFARHFLNACMCILGVEATSEGIVDQGKVTRVAVFPIGIEPERFINTSELSEVVQYMKKFKNDFGGRKLILGVDRLDTIKGIPQKYQAFEKFLEENAEWRGKVMLLQIAVPTRNGIGEYQKIKDQCHYHVGRINGRFGSISSVPIIHLDCSIDFNQLCALYAITDVLLVTSLRDGMNLVSSEFIACQKAEKGVLILSEFAGAGQSLGAGAILVNPWNIKEVSSAIGEALNMSHEEKERKHKINFQYVKTHSTQQWADDFMKLTLTNILCSKLIEITTSAELGAGLAATLELPEHDVIQQYSKSNNRLLILGFYGTLTQPMKNQERRGDGMNLELHPQLKERLKELCSDPKTTVVVLSRSEKCILDKNFGEYNMWLAAENGMFLRHTSGEWVTRIPEHMNLEWIDGVKHVFKYFTERTPGSYLETSEASLVWNYENADAEFGRAQARDMLQHLWAGPISNASVDVVRGGQSVEVHAVGVTKGSAMERILGEIVHNKSMATPIDYVLCIGCFLGKDEDVYTFFEPELTKKAKSLSSSGSDSPKKVSSTIVDLKGENYFSVAIGQTHTKARYFLDSSDDVVKLIGKLCTHNNA

SEQ ID NO: 284 - DNA, 2580 bp, Oryza sativa
atgccgacccccgcgccgtcggcatcgtcctcctcctcctcctgcggcggcggtggcggtggcgccggggccgcgtcgtcctactcctcctccccggacgaccgcatgctccgcggggagtgcggccgccgccaccccttcgcgtcgtcggcggcggtgggggccggttccccggacgccatggacacggactccgcggagccttcctccgcggcgacctccgtcgcggacttcggggcccggtcgccgttctcgccgggggccgcctcgcccgccaacatggacgacgcgggcggcgcgtcggcggcggggcacgcggcgcggccgccgctcgccgggccgcgcagcgggttccgccgcctcggcctccgcgggatgaagcagcgcctcctcgtcgtcgccaaccgcctccccgtctccgccaatcgccgcggcgaggaccagtggtccctggagatcagcgccggcggcctcgtcagcgccctcctcggcgtcaaggacgtggacgcgaagtggatcggatgggcgggcgtcaacgtccccgacgaggtcggccagcgagctctcacccgagcgctcgccgagaagagatgtataccagtgttcctggatgaggaaatcgtgcaccaatactacaacggatactgcaacaacatactctggcctctgtttcactacctgggattgccacaggaggacaggttggcgacgacgaggaatttcgagtcacagttcaacgcgtacaagcgagcaaaccagatgttcgctgatgttgtgtaccagcactacaaggaaggggatgtgatctggtgccatgattaccacctcatgttcctgcccaagtgcctcaaggatcatgacatcaacatgaaggtcgggtggttcctgcacacgccattcccttcttcggagatttaccggacgctgccctcccggtcggagctgcttcgctccgtgctctgtgctgatttagtcggatttcatacatatgattatgcaagacattttgtgagcgcatgtacaagaatacttggactggagggcactcctgagggtgtggaagaccaaggaaggctaaccagagttgctgcgtttcctattgggatagactctgaacgtttcaagcgagcattggagcttccagcagtaaaaagacacatcactgaattaacacaacgttttgatggtcgaaaggtaatgcttggtgttgaccgacttgacatgatcaaaggaattccgcaaaagattttggcctttgaaaagtttctcgaagaaaaccatgaatggaatgataaagtggttctacttcaaattgctgtgccgacaagaactgatgtccctgagtatcaaaagcttacaagtcaggtgcatgaaattgttgggcgcataaatggccgatttggaacactgactgctgttcctattcatcatctggaccgatctcttgatttccatgccttgtgtgccctttatgcagtcactgatgtggcccttgtaacatcgctgagagatggaatgaatcttgtaagctatgaatatgttgcatgccaaggatcaaaaaaaggagttttgatattgagtgagtttgctggggcagcacagtctcttggagccggtgctattttagtaaacccctggaatattactgaagtcgcagactcaatcaagcatgctttgacaatgtcatctgatgagagagaaaagcgacataggcataactatgctcatgtgacaactcacactgcacaagattgggccgaaacttttgtatgtgagttaaatgagacagttgctgaagctcagctgagaacaagacaagttccacctgatctccctagtcaagcagcaattcaacaatatctgcattccaaaaatcggttgctcatattggggttcaattcaacattgactgagccagttgaatcctctgggagaaggggtggtgaccaaatcaaggaaatggagctcaagttgcatcctgagttgaagggccctttgagagccctctgtgaggatgagcatactacagttattgttcttagtggaagtgacaggagcgtccttgatgaaaatttcggagaattcaatatgtggttagcagcagagcatggcatgtttttacgtccaactaatggagagtggatgacaacaatgcctgagcatctgaacatggattgggtagacagtgtaaagaatgtttttgaatactttacagaaagaaccccaaggtctcattttgaacaccgtgagacatcatttgtatggaattacaagtatgctgatgttgagtttggacggctccaagcaagagatatgctgcagcacttgtggacaggtccaatctcaaatgcagcagtcgatgttgttcaaggaagccgatcagttgaagttcggtctgtcggagttacaaagggtgctgcaattgatcgtattctaggagagatagttcatagcaaaagcatgattactccaattgattatgttctatgcattgggcacttcctaggaaaggtaattatgcaattaatttatatgtgcatatccgtttctttcagtgcaaggtgctttttttgtctttga

SEQ ID NO: 285 - protein, 859 aa, Oryza sativa
MPTPAPSASSSSSSCGGGGGGAGAASSYSSSPDDRMLRGECGRRHPFASSAAVGAGSPDAMDTDSAEPSSAATSVADFGARSPFSPGAASPANMDDAGGASAAGHAARPPLAGPRSGFRRLGLRGMKQRLLVVANRLPVSANRRGEDQWSLEISAGGLVSALLGVKDVDAKWIGWAGVNVPDEVGQRALTRALAEKRCIPVFLDEEIVHQYYNGYCNNILWPLFHYLGLPQEDRLATTRNFESQFNAYKRANQMFADVVYQHYKEGDVIWCHDYHLMFLPKCLKDHDINMKVGWFLHTPFPSSEIYRTLPSRSELLRSVLCADLVGFHTYDYARHFVSACTRILGLEGTPEGVEDQGRLTRVAAFPIGIDSERFKRALELPAVKRHITELTQRFDGRKVMLGVDRLDMIKGIPQKILAFEKFLEENHEWNDKVVLLQIAVPTRTDVPEYQKLTSQVHEIVGRINGRFGTLTAVPIHHLDRSLDFHALCALYAVTDVALVTSLRDGMNLVSYEYVACQGSKKGVLILSEFAGAAQSLGAGAILVNPWNITEVADSIKHALTMSSDEREKRHRHNYAHVTTHTAQDWAETFVCELNETVAEAQLRTRQVPPDLPSQAAIQQYLHSKNRLLILGFNSTLTEPVESSGRRGGDQIKEMELKLHPELKGPLRALCEDEHTTVIVLSGSDRSVLDENFGEFNMWLAAEHGMFLRPTNGEWMTTMPEHLNMDWVDSVKNVFEYFTERTPRSHFEHRETSFVWNYKYADVEFGRLQARDMLQHLWTGPISNAAVDVVQGSRSVEVRSVGVTKGAAIDRILGEIVHSKSMITPIDYVLCIGHFLGKVIMQLIYMCISVSFSARCFFCL

SEQ ID NO: 286 - DNA, 2769 bp, Populus tremuloides
atgcctggaaaccagtacaacggtaactctacccttaactcaggtcgtgtcggacggctcttaaagataagagagcaaaggagaagtatcaggtctgcctattcaaatgaggtaactgataaccatagaggaactgaagcatgtgaaaatgatttgcgcacgcgagaaggtgacagcttaaacaattcatttatcgaacaatacttggaaggtgctatcgcagagggatatgaaaagctggatgtcaggcctttaaggcaacggctgttggtggtagctaatagactacctgtatctgcagttagaagaggtgaagactcatggtctttggagataagtgctgggggcttagtcactgctcttctaggtgtaaaggagtttgaggcgaaatggattggttgggctggagttaatgtgccagatgaagttggccagaaggcgcttactgaagctttggctgaaaagaggtgtattccggtattccttgacgaagagattgttcatcaatattataatggctactgcaacaatatattgtggcccctctttcattaccttgggcttccacaagaagatcgacttgccacgaccagaagtttccagtctcagtttgctgcatataagaaggcaaaccaaatgtttgctgatgtggtgaatcagcactatgaggagggtgatgttgtctggtgccatgattaccatttgatgtacctcccaaaatgccttaaggaatacaataataatatgaaagttggttggtttctccacacaccctttccttcttctgaaatccataggacgctgccatctcgatcagacctactacgttctgttcttgcagccgatttagttgggtttcacacctatgactatgcaagacattttgttagtgcttgtactcgtattcttgggctagagggcacacctgaaggcgttgaggatcaagggaggctgactcgagttgctgcgtttcccattgggatagactcagatcggttcataagagctcttgaactccctcaagtccaggaacacatcaaagaactgaaggaaagatttgctggccgaaaggtaatgctaggtgttgaccgccttgatatgattaaaggaattccacagaagattcttgcatttgaaaaatttctcgaggagaattccgcctggcgtgataaagttgttctactgcagattgctgtgccaacaagaacagatgttcctgagtatcaaaaacttacaagccaagttcatgaaattgttggacgcattaatggcagatttggaacattaactgctgttccaatacaccacctggatcgctctctcgacttccatgccttgtgtgctttatatgcagttaccgatgttgctcttgtaacttctttaagggatggaatgaatctcgtcagttatgagtttgtagcatgccaagattcgaagaaaggtgtgctcattcttagtgagtttgcaggtgcagcccaatctctaggtgctggagcaatccttgtgaatccttggaacatcactgaagttgctgattcaatacgccaagctctaactatgtcccctgaagaaagagagaagcgacatcgccacaactttgtccatgtgacaacccacactgctcaagaatgggctgaaacttttgtgagtgaactagatgatacagttatcgaggcacaactaaggaccaagcaagtgccacctgcacttccagaagaagatgcaattagtcgttatttgcagtctactaatcgattgctcatactgggattcaatgcaacattgactgagccagcggacactcctgggagaagagctgatcaaattaaagaaatggaacttaaattgcacccagagttaaaagaagcattgacagcactttgcagtgatagaaagacaaccattgttgttctcagtgggagtgaccgaaaaacattagatgataactttggggagtatgacatgtggttggcagcagaacatggaatgtttttgcgacttacaaagggagaatggatgacaacaatgccagaacacttaaatatggaatgggttgacagtgtgaagcatgtttttgagtacttcacagaacgtactccccgatcacattttgaacgctgtgaaacatcacttgtatggaattacaagtatgcagatgttgaatttgggaggcttcaagcaagggatatgttgcaacacctctggacgggcccaatttcaaatgcctctgttgatgtggtccaagggaatcgatcagttgaggttcgagcagttggtgttacaaagggtgctgctattgatcgtatactgggagagattgtccatagtaaatccatgacaacaccaattgattatgtcctatgcattggccattttctgggaaaggatgaagatgtgtacaccttctttgagccagagctcccttctgatagcttagctgttgcaagaactaagcaaaatgatggactaaaatcgcccattgatagacgaccttctatgaagcttccagccattagaagcgtgtctaaatcatctcaaggtaaggcacagcgacctttactaaatcccgagaagagaacagctaaccacggctgtgggagtgggcgacggccatcagcagaaaagatttcatggaacgtgcttgatctcaagggagataattacttctcctgtgctgttggtcgaactcgcacaaatgctcgctatctacttggatcatcagatgatgtcgtgtccttcctaatgaaattagccaatgcatctacgtga

SEQ ID NO: 287 - protein, 922 aa, Populus tremuloides
MPGNQYNGNSTLNSGRVGRLLKIREQRRSIRSAYSNEVTDNHRGTEACENDLRTREGDSLNNSFIEQYLEGAIAEGYEKLDVRPLRQRLLVVANRLPVSAVRRGEDSWSLEISAGGLVTALLGVKEFEAKWIGWAGVNVPDEVGQKALTEALAEKRCIPVFLDEEIVHQYYNGYCNNILWPLFHYLGLPQEDRLATTRSFQSQFAAYKKANQMFADVVNQHYEEGDVVWCHDYHLMYLPKCLKEYNNNMKVGWFLHTPFPSSEIHRTLPSRSDLLRSVLAADLVGFHTYDYARHFVSACTRILGLEGTPEGVEDQGRLTRVAAFPIGIDSDRFIRALELPQVQEHIKELKERFAGRKVMLGVDRLDMIKGIPQKILAFEKFLEENSAWRDKVVLLQIAVPTRTDVPEYQKLTSQVHEIVGRINGRFGTLTAVPIHHLDRSLDFHALCALYAVTDVALVTSLRDGMNLVSYEFVACQDSKKGVLILSEFAGAAQSLGAGAILVNPWNITEVADSIRQALTMSPEEREKRHRHNFVHVTTHTAQEWAETFVSELDDTVIEAQLRTKQVPPALPEEDAISRYLQSTNRLLILGFNATLTEPADTPGRRADQIKEMELKLHPELKEALTALCSDRKTTIVVLSGSDRKTLDDNFGEYDMWLAAEHGMFLRLTKGEWMTTMPEHLNMEWVDSVKHVFEYFTERTPRSHFERCETSLVWNYKYADVEFGRLQARDMLQHLWTGPISNASVDVVQGNRSVEVRAVGVTKGAAIDRILGEIVHSKSMTTPIDYVLCIGHFLGKDEDVYTFFEPELPSDSLAVARTKQNDGLKSPIDRRPSMKLPAIRSVSKSSQGKAQRPLLNPEKRTANHGCGSGRRPSAEKISWNVLDLKGDNYFSCAVGRTRTNARYLLGSSDDVVSFLMKLANAST

SEQ ID NO: 288 - DNA, 2934 bp, Sorghum bicolor
atgagctctgacgccgcggggggacagcgcagcatcagcaactccacgaggggcgacgcggcggcggcgatgccaacctcatcgccctttgtcgtcggcgacagcagcggcggcgcgggctccccgatccgcgtcgaccgaatggtccgggagcacggccgccgctacgacatcttcgcgtcggacgcgatggataccgacggcgccgagccggcgtcggcttccgcggggcccttcgccgtggatggggtccagtcgcctggccgtgtgtcacccgccaacatggaggatgccggcggcgcggccgctgggcacgccgcgcgaccgccgctcgccggctcccgcagcggtttccgccgcctcggcctccgtggcatgaagcagcgcctcctcgtcgtggccaaccgcctccctgtttccgccaaccgccgcggcgaggaccactggtcgcttgagatcagcgccggcggcctcgtgagcgccctgcttggggtgaaggacgtcgacgcgaaatggattggctgggcgggcgtcaacgttccagacgaggttggccagcgagccctcaccaaagctcttgccgagaagagatgcataccagtgttcctggatgaggagattgtgcaccagtactacaatgggtattgcaacaacatcctgtggccgctgttccactacctaggactaccacaggaggacaggctggcaacaacgaggaactttgagtcacagttcgacgcgtacaagcgtgctaaccagatgtttgctgatgtcgtgtaccagcactaccaggagggggatgtaatctggtgccatgactaccacctcatgttcctgcccaagtgcctcaaggaccatgacatcaatatgaaagtcggttggttcctgcacacgccattcccatcatcagagatttaccgaacactgccatcccgcttggagctgcttcgctcggtgctgtgtgctgatttagtcggatttcatacttacgactatgcgaggcattttgtgagtgcttgcactagaatacttggacttgagggtacccctgagggtgtggaagatcaaggaagactaaccagggttgcagcgtttcctattgggatagactctgatcgtttcaagcgagcattggagcttccagcagtaaaaaggcacatcagtgaattgacacaacgttttgctggtcgaaaggtaatgcttggtgttgatcgacttgacatgattaagggaattccacaaaagattttggcctttgaaaagtttcttgaggaaaacccagactggaacgacaaagttgttctactgcagattgctgtgccaacaagaactgacgtccctgagtatcaaaagctaacaagccaagtgcatgaaattgttgggcgcataaacggtcgattcggaacgttgactgctgtccctattcatcatctggaccgatctcttgatttccatgctttgtgtgctctttatgcagtcactgatgttgctcttgtaacatcactgagagatgggatgaaccttgtgagctatgagtatgttgcatgccaagggtctaagaaaggagttttgatacttagtgagtttgctggggcagcacaatcacttggagctggcgccattctagtaaacccttggaatattacagaagttgcagactcaatacggcacgctttgacgatgccatccgatgagagagagaaacggcacaggcacaactatgctcatgtcacaactcacacggctcaagattgggctgaaacttttgtatttgagctaaatgacacggttgctgaagcactactgaggacaagacaagttcctcctggacttcctagtcaaacggcaatccagcaatatttgcgctctaaaaatcgtctgctcatattgggtttcaattcaacattgactgaaccagtcgaatcctctgggagaaggggtggtgaccaaatcaaggaaatggaactcaagttgcatcctgacttaaagggtcctctgagagccctctgtgaagatgagcgcactacagttattgttcttagtggcagtgacaggagtgttcttgatgaaaatttcggagaatttaaaatgtggttggcagcagagcatgggatgtttttacgcccgacttatggagaatggatgacaacaatgcctgagcatctgaacatggattgggttgacagcgtaaagcatgtttttgaatactttacagaaagaaccccaagatcccatttcgaacatcgtgaaacatcatttgtgtggaactacaagtatgctgatgttgaatttggaaggctacaagcaagagatatgctgcagcacttgtggacaggtccgatctcaaatgcagctgttgatgttgttcaagggagtcggtcagttgaagttcggtctgttggagttacaaagggtgctgcaattgatcgcattttaggggagatagttcacagcgaaaacatggttactccaattgactatgtcctgtgtatagggcatttccttgggaaggatgaggatatctatgtcttttttgatcccgagtacccttctgaatccaaaataaaaccagagggtggctcagcttcacttgaccggaggcccaacggaaggccaccatcgaacggcaggagcaactccaggaacccacagtccaggacacagaaggcgcagcaggctcaggctgcatccgagaggtcatcctcttcaagccacagcagcgcaagcagcaaccatgactggcgcgaagggtcctcggtccttgatctcaagggcgagaactacttctcctgcgccgttggaaggaaacggtccaacgcccgctacctgctgagttcgtcagaggaggttgtctccttcctcaaggagctggcaacagcaacagctggcttccaatccagctgtgctgattacatgttcctggataggcagtaa

SEQ ID NO: 289 - protein, 977 aa, Sorghum bicolor
MSSDAAGGQRSISNSTRGDAAAAMPTSSPFVVGDSSGGAGSPIRVDRMVREHGRRYDIFASDAMDTDGAEPASASAGPFAVDGVQSPGRVSPANMEDAGGAAAGHAARPPLAGSRSGFRRLGLRGMKQRLLVVANRLPVSANRRGEDHWSLEISAGGLVSALLGVKDVDAKWIGWAGVNVPDEVGQRALTKALAEKRCIPVFLDEEIVHQYYNGYCNNILWPLFHYLGLPQEDRLATTRNFESQFDAYKRANQMFADVVYQHYQEGDVIWCHDYHLMFLPKCLKDHDINMKVGWFLHTPFPSSEIYRTLPSRLELLRSVLCADLVGFHTYDYARHFVSACTRILGLEGTPEGVEDQGRLTRVAAFPIGIDSDRFKRALELPAVKRHISELTQRFAGRKVMLGVDRLDMIKGIPQKILAFEKFLEENPDWNDKVVLLQIAVPTRTDVPEYQKLTSQVHEIVGRINGRFGTLTAVPIHHLDRSLDFHALCALYAVTDVALVTSLRDGMNLVSYEYVACQGSKKGVLILSEFAGAAQSLGAGAILVNPWNITEVADSIRHALTMPSDEREKRHRHNYAHVTTHTAQDWAETFVFELNDTVAEALLRTRQVPPGLPSQTAIQQYLRSKNRLLILGFNSTLTEPVESSGRRGGDQIKEMELKLHPDLKGPLRALCEDERTTVIVLSGSDRSVLDENFGEFKMWLAAEHGMFLRPTYGEWMTTMPEHLNMDWVDSVKHVFEYFTERTPRSHFEHRETSFVWNYKYADVEFGRLQARDMLQHLWTGPISNAAVDVVQGSRSVEVRSVGVTKGAAIDRILGEIVHSENMVTPIDYVLCIGHFLGKDEDIYVFFDPEYPSESKIKPEGGSASLDRRPNGRPPSNGRSNSRNPQSRTQKAQQAQAASERSSSSSHSSASSNHDWREGSSVLDLKGENYFSCAVGRKRSNARYLLSSSEEVVSFLKELATATAGFQSSCADYMFLDRQ

SEQ ID NO: 290 - DNA, 2985 bp, Selaginella lepidophylla
atgcctcagccttacccttcttcctcatccacaagcaatgccaaggaggcaggaggaggcgctgcggcggcggggggcggcggcggcggcgccttcagcttgccgccgtcgctagcatcatcgcgagtggagcgcctggtgcgtgagaggcagctgcggaatcaaaggcaggaggatgaacctgaggatgagcagcaggcgctggaggcggaggaagcggcggtggcggctaccgaggtgcccgatgccgtcgccgctgccacgccatcgctctccgatgagccgtccaagatttccagcggtcgaggccagcggttgcttgtggttgccaatcgccttcccttgtctgccacgaggaaaggcgagacggaatggaatttggagatgagcgccgggggccttgtaagtgcgcttttgggcgtcaagcagtttgaagtcacctggatcggatggcctggtgtctatgtacaagacgagaagggtgagaaatcgctgcgaggagctcttgaagaaaagggatttgtgcccgttcttctcgacgaggcaactgttgatcagtactacaatggctattgcaacaacgtgctttggccgcttttccactacattggtcttaggcaggaagaccggctggctgccacgcgcagcttactatcccagtttaacgcatataaacgtgctaatcgtttgtttgcggaggctgtgttcaatttctaccaggaaggggatgtggtgtggtgccacgattaccatcttatgttcctccccagctacctcaaggagaaggacagccagatgaaagtcgggtggttcctccacacgccgttcccctcgtctgagatttacagaacgctgccgctgcgggccgagctgctccaaggcgtcttagctgcggatttggtggggttccacacatacgactatgcaaggcactttgttagcgcgtgcacacggatactcgggctggaaggcactcccgagggtgtcgaggatcaagggaagaacacgcgagtggctgccttccccgtggggatcgactcggagcgatttatcgaggccgtagaaactgatgcggtcaagaaacacatgcaagagctgagccagcgttttgctggtcgtaaggttatgttgggggtggataggcttgacatgattaaaggaattccacagaagctgctagcctttgaaaaattcctcgaggagaactccgagtggcgtgataaggtcgtcctggtgcaaatcgcggtgccgactagaacggacgtcctcgagtaccaaaagcttacgagccaggttcacgagattgttggtcgcataaatggacgtttcggctccttgacggctgttcctatccatcacctcgatcgctccatgaaatttccggagctttgtgccttatatgcaatcactgatgtcctgctcgtgacatccctgcgtgatggcatgaacctcgtgagctacgagttcgttgcttgccaaaaggataagaagggcgcgcttattctgagtgagtttgcaggcgctgcgcagtctctgggtgcggggtctatcctcataaatccgtggaatataatagagtcgtccaacgccattgcggacgctctcaacatgccagaagaagaacgggaagaacggcatcgtcataacttcatgcacataactactcacagtgctcaagtatgggcggagacgtttatcagcgaactcaatgattccatcttggaagccgagctgcgcactctgcatattccgcctcaattgcctttggataaagcagtcgcaaagtactcggagtcaaagaaccggctagtaattttgggcttcaactcgactttgaccgcgcaagtggaagctccgagaggtagggcgcccgaccagatcagggagatgaagatacgtcttcatcctagcataaaggacatcctcaatgtactttgctctgatccaaagacgacaatagtcatcctaagcgggagcgagcgcgtggctcttgacgaggtatttggagagttcgatttgtggctggcggcggaaaacgggatgtttcttcgtcatactcaaggggagtggatgacaacaatgcccgaacatctgaacatggattggttggaaagtgtacagttggtctttgattatttttgtgagaggacgccacgctcttttgtcgagacccgtgagacgtctctggtgtggaactataagtatgcagatgttgaattcggcagggtgcaggcacgtgatatgctacagcacctgtggaccgggcccatatccaacgctgccgtcgacgtcgtgcaaggcggaaagtcggtcgaggtccgccccgtaggagtctcgaaggggtctgcaattgaccggattctaggcgaaatcgtgcacagcaaacacatgacgatacccatcgactacgtcctttgcataggacactttttgagcaaggacgaggatatctacacattcttcgaaccggagctgccactgctggacagggactcgtcgacgagcaacggagggaaaccactgggtggaaagcttccaatagaccgaaagtcttcaaagagctcctctcgcatgaagccgccagtgtcgtcaccaaagtcacccggccgtggaagcgagcagcagcagcaagctgaggaggcaagcagatgggaaggatcgtccgtgctggatctccagggagagaactacttcagctgtgcagtgggaaccatgaagaggtcactagctcgctactgcctcacttcttcagaggaggtggtgacattcctgacctcgctcacaagcacagtggcagcagcagcaggggcaggagcaggagcaagagcgacgggatcaggagcagcaggagcaggagcaggagcaggagcaggtggggatcatgaagctccaggatcaccaatcaggaaaagcgattcgttcaagacgagcgggtggcatagtccaacgccccgctctccaaagctcgctccagcggtacagtga

SEQ ID NO: 291 - protein, 994 aa, Selaginella lepidophylla
MPQPYPSSSSTSNAKEAGGGAAAAGGGGGGAFSLPPSLASSRVERLVRERQLRNQRQEDEPEDEQQALEAEEAAVAATEVPDAVAAATPSLSDEPSKISSGRGQRLLVVANRLPLSATRKGETEWNLEMSAGGLVSALLGVKQFEVTWIGWPGVYVQDEKGEKSLRGALEEKGFVPVLLDEATVDQYYNGYCNNVLWPLFHYIGLRQEDRLAATRSLLSQFNAYKRANRLFAEAVFNFYQEGDVVWCHDYHLMFLPSYLKEKDSQMKVGWFLHTPFPSSEIYRTLPLRAELLQGVLAADLVGFHTYDYARHFVSACTRILGLEGTPEGVEDQGKNTRVAAFPVGIDSERFIEAVETDAVKKHMQELSQRFAGRKVMLGVDRLDMIKGIPQKLLAFEKFLEENSEWRDKVVLVQIAVPTRTDVLEYQKLTSQVHEIVGRINGRFGSLTAVPIHHLDRSMKFPELCALYAITDVLLVTSLRDGMNLVSYEFVACQKDKKGALILSEFAGAAQSLGAGSILINPWNIIESSNAIADALNMPEEEREERHRHNFMHITTHSAQVWAETFISELNDSILEAELRTLHIPPQLPLDKAVAKYSESKNRLVILGFNSTLTAQVEAPRGRAPDQIREMKIRLHPSIKDILNVLCSDPKTTIVILSGSERVALDEVFGEFDLWLAAENGMFLRHTQGEWMTTMPEHLNMDWLESVQLVFDYFCERTPRSFVETRETSLVWNYKYADVEFGRVQARDMLQHLWTGPISNAAVDVVQGGKSVEVRPVGVSKGSAIDRILGEIVHSKHMTIPIDYVLCIGHFLSKDEDIYTFFEPELPLLDRDSSTSNGGKPLGGKLPIDRKSSKSSSRMKPPVSSPKSPGRGSEQQQQAEEASRWEGSSVLDLQGENYFSCAVGTMKRSLARYCLTSSEEVVTFLTSLTSTVAAAAGAGAGARATGSGAAGAGAGAGAGGDHEAPGSPIRKSDSFKTSGWHSPTPRSPKLAPAVQ

SEQ ID NO: 292 - DNA, 2781 bp, Solanum lycopersicum
atgccagggaacaagtataccggcaaccaagcggttgctagcactcgattggagaggctattgagagaaagagagcttaggaaaagtagcaaagtttctcactttccaaatgaatctactgataacaataggggaaacgagctctctgaccatgattttcgccaaggagaagctgataatggaggagtttcatatgtcgaacagtacctcgaaggagctgcactagcatataatgaaggatgggagcggcctgatggaaagcccaccagacaacgactcttggttgtggcaaacaggttacctgtctctgcagtaaggagaggcgaggaatcctggtctctagagataagtggtggaggtcttgttagtgctcttcttggtgtgaaggagtttgaggctagatggattggttgggcaggtgtgaatgtgccagatgaggctgggcagagggcacttactaaggcactggcagaaaagaggtgtatccctgtattcctggatgaagaaattgttcatcagtattacaacggttactgcaacaatatattgtggcctcttttccattatcttggacttccgcaagaagaccgccttgcgactaccagaagtttccagtctcagtttgctgcttataagaaagcaaatcaaatgtttgctgatgttgtgaatgaacattacgaagaaggtgatgtggtatggtgtcatgactaccatctcatgttcctgccaaaatgtctcaaggattacaacagccaaatgaaagtcggttggtttctacacacaccctttccatcctcggaaatacacaggacactgccgtctagatcagagctgctccgagcagttcttgctgctgacttggttggttttcatacctatgactatgcaaggcattttgttagtgcatgtactcgtatcctgggacttgaaggaacacctgaaggagtagaagatcaaggtagactgacccgcgttgctgcgtttcctattggtatagattcagaacgatttattcgagcacttgaagttactcaagttcaggaacacataaaagaactaaaagagagatttgctgggagaaaggttatgctaggagttgatcgccttgatatgattaaaggaattccccaaaagatcctggcatttgagaagttccttgaagaaaatccgtactggcgtgataaagtggttttgcttcaaattgctgtgccaacaagaacagatgttcctgaataccaaaaacttaccagtcaagttcatgagattgttggacgcatcaatggtcggtttggaactttgactgcagtgcctattcatcatctggaccgttctcttgactttcatgcattatgtgcactgtatgctgtaactgatgtagcgttggttacctctttaagagatggcatgaacctcgtcagctatgaatttgtagcctgccaagagttgaaaaaaggggtccttattctcagcgaatttgctggtgctgcacaatcgttaggtgctggagcaattctggtgaatccatggaatataacagaggttgctgcttcgattgggcaagctttaaatatgtcagctgaagaaagagaaaaacgccacaggcataactttctgcatgtgactacgcatactgctcaagaatgggctgagacttttgtgagtgaactaaatgatactgttattgaagctcaacagaggataagaaaagttccgccccggcttaacatcagtgatgcaattgagcgctattcgttttccaataatcgactactaatattgggtttcaattctacactgacagaatcggtggatacccctggaagaagaggtggagatcaaatcaaagaaatggaactgaaattgcatcctgagttgaaagaatcattgctcgcgatttgtaacgacccaaagacaacagtcgttgtcctcagtggaagtgatagaaacgtcttagatgataacttcagcgagtacaacatgtggttagcagcagaaaatggaatgtttttacgatctacaaacggtgtatggatgacaactatgccagaacacctaaacatggactgggttgatagtgttaagcacgttttcgagtacttcactgaaaggacaccgagatctcactttgaacaacgtgaaacttcacttgtttggaattacaagtatgcagatgttgaatttggaagattgcaagctagagacatgcttcagcatctctggacaggtccaatatcaaatgcatctgttgatgttgtacaaggactccgctccgttgaggttcgagcagttggtgttacaaagggagcagcaatagatcgtatactgggggagatcgtacacagtaaagccatcgcaacaccaattgattacgttttatgcatagggcattttctggggaaggatgaggatgtatatacattttttgagccagagcttccttctgactgcatcggtatgccaagaagtaaggtcagtgatgcaccaaaggtgcccggggaaaggcgatcagttccaaaactcccttctagtcgaactagctcaaagtcatctcagaataggaacagaccagtttcaaactcggataagaagacttccaatgggcgacggccctcacctgaaaatgtgtcatggaatgtgctggatctgaagaaggagaattacttctcttgtgcagttggaaggactcgtacaaacgctcggtatctgctcagtacgccagacgacgttgttgcttttctaagggaactagctgaagcacctatttcaaatgggacatcatga

SEQ ID NO: 293 - protein, 926 aa, Solanum lycopersicum
MPGNKYTGNQAVASTRLERLLRERELRKSSKVSHFPNESTDNNRGNELSDHDFRQGEADNGGVSYVEQYLEGAALAYNEGWERPDGKPTRQRLLVVANRLPVSAVRRGEESWSLEISGGGLVSALLGVKEFEARWIGWAGVNVPDEAGQRALTKALAEKRCIPVFLDEEIVHQYYNGYCNNILWPLFHYLGLPQEDRLATTRSFQSQFAAYKKANQMFADVVNEHYEEGDVVWCHDYHLMFLPKCLKDYNSQMKVGWFLHTPFPSSEIHRTLPSRSELLRAVLAADLVGFHTYDYARHFVSACTRILGLEGTPEGVEDQGRLTRVAAFPIGIDSERFIRALEVTQVQEHIKELKERFAGRKVMLGVDRLDMIKGIPQKILAFEKFLEENPYWRDKVVLLQIAVPTRTDVPEYQKLTSQVHEIVGRINGRFGTLTAVPIHHLDRSLDFHALCALYAVTDVALVTSLRDGMNLVSYEFVACQELKKGVLILSEFAGAAQSLGAGAILVNPWNITEVAASIGQALNMSAEEREKRHRHNFLHVTTHTAQEWAETFVSELNDTVIEAQQRIRKVPPRLNISDAIERYSFSNNRLLILGFNSTLTESVDTPGRRGGDQIKEMELKLHPELKESLLAICNDPKTTVVVLSGSDRNVLDDNFSEYNMWLAAENGMFLRSTNGVWMTTMPEHLNMDWVDSVKHVFEYFTERTPRSHFEQRETSLVWNYKYADVEFGRLQARDMLQHLWTGPISNASVDVVQGLRSVEVRAVGVTKGAAIDRILGEIVHSKAIATPIDYVLCIGHFLGKDEDVYTFFEPELPSDCIGMPRSKVSDAPKVPGERRSVPKLPSSRTSSKSSQNRNRPVSNSDKKTSNGRRPSPENVSWNVLDLKKENYFSCAVGRTRTNARYLLSTPDDVVAFLRELAEAPISNGTS

SEQ ID NO: 294 - DNA, 2580 bp, Triticum aestivum
atgaagcagcgcctcctcgtcgtggccaaccgcctccccgtctccgccaatcgccgcggcgaggatcagtggtccctggagatcagcgccggtggcctcgtcagcgcgctcctcggtgtgaaagatgtcgacgcgaagtggatcggctgggccggtgtgaatgtccccgacgaggtcggccagcaggctctcaccaatgcactcgccgagaagagatgcataccagtcttcctggacgaggagatcgtgcaccagtactacaacggctactgcaacaacatactgtggccgctcttccactacctcgggctgccgcaggaggacaggctggcaaccacccggaacttcgagtcgcagttcgacgcgtacaagcgggccaaccagatgtttgctgatgtcgtctaccagcactaccaggaaggggatgtgatctggtgccatgactaccacctcatgttcctgcccaggtgcctcaaggagcatgacatcaacatgaaggtcgggtggttcctgcacacgcccttcccttcctcggagatttaccgcactctgccatcacgctcggagctgcttcgctccgtgctctgcgctgatttagtcggatttcatacatacgactatgcaaggcatttcgtgagcgcatgtaccagaatactcggactcgagggtacccctgaaggtgtggaggaccagggaaagttaacgcgggttgcagcgtttcctattgggatagactctgatcgtttcaaaagggcgttggacattgacgcagcaaaaagacatgtcaatgaactgaaacagcgatttgcgggacggaaggtaatgcttggtgttgatcgacttgacatgatcaaaggaattccccaaaagattttggcctttgaaaagtttcttgaggaaaaccctgaatggattgataaagtggttctacttcaaattgctgtgccaactagaactgacgtccctgagtatcagaagcttacaagccaagtgcatgaaattgttgggcgcataaatggacgatttggaacattgtctgctgttcctattcatcatctggatcgatctcttgatttccatgccttgtgtgctctttatgcagtcactgatgtggctcttgtaacatcactgagggatggcatgaatcttgtaagctacgaatatgttgcatgccagggatcaaaaaaaggagttctgatattgagtgagtttgccggtgcagcacaatcgcttggtgctggtgccattcttgtaaatccctggaatattacagaagttgcagactcaataaaacatgctttgacaatgacatctgatgagagagagaagcggcacaggcataactacgcgcatgtaacaactcataccgcccaagattgggctgaaacttttgtatgtgagctaaacgatacagttgctgaagctctgatgagaacaagacaagttccccctgaccttcctagtcgaacggccatccagcaatatctgcagtcaaaaaaccgtttgctcatattgggtttcaattcaacattgaccgagccagttgaatcctctgggagacggggcggtgatcaagtcaaggagatggaactcaagttgcatcctgacttaaagggtcctttgagagccctctgcgaggacgagagcactacggttatcgttctcagcggaagcgacaggagtgttcttgatgaaaatttcggagaatttaacttgtggctggcagcagagcatgggatgttcttacgcccaactgatggagaatggatgacaacaatgcctgagcatctgaacatggattgggtcgacagtgcaaagcatgtttttgagtacttcacagaaagaaccccaagatctcattttgaacatcgtgaaacatcatttgtgtggaattacaagtatgccgatgttgagtttgggaggctccaagcaagagatatgctgcagcacttgtggaccggtccaatctcaaatgcagctgtggatgttgttcaagggagccgttcagttgaagttcgctctgttggagttacaaagggtgctgcaattgatcgtattctaggagagatagttcacagcaaaagcatggttactccgattgactatgtgctatgcataggccacttcctaggaaaggacgaagacatctatgtgttttttgaccctgaatacccttctgagccaaaagtgaaaccggacggtgcgtcggtatccgtcgacaggaggcagaacgggcggccatcaaacggccggagcaactcgaggaactcgcaggcgaggacacaaaagcctcaggtcgcgccgccgcctccggagaggtcatcgtcgtcatccgaccacagcaccgcaaacaacaacagccaccacgactggcgcgaagggtcgtcggtcctcgacctcaacggcgacaactacttctcctgcgcggtcgggaggaagcgctccaacgcccgttacctgctcaactcgtcggaggacgtcgtctcattccttaaggagatggcggagtcgacgacgccccgcgccggtggcctcccgcccggcgctgccgcggactacatgttcttggataggcagtag

SEQ ID NO: 295 - protein, 859 aa, Triticum aestivum
MKQRLLVVANRLPVSANRRGEDQWSLEISAGGLVSALLGVKDVDAKWIGWAGVNVPDEVGQQALTNALAEKRCIPVFLDEEIVHQYYNGYCNNILWPLFHYLGLPQEDRLATTRNFESQFDAYKRANQMFADVVYQHYQEGDVIWCHDYHLMFLPRCLKEHDINMKVGWFLHTPFPSSEIYRTLPSRSELLRSVLCADLVGFHTYDYARHFVSACTRILGLEGTPEGVEDQGKLTRVAAFPIGIDSDRFKRALDIDAAKRHVNELKQRFAGRKVMLGVDRLDMIKGIPQKILAFEKFLEENPEWIDKVVLLQIAVPTRTDVPEYQKLTSQVHEIVGRINGRFGTLSAVPIHHLDRSLDFHALCALYAVTDVALVTSLRDGMNLVSYEYVACQGSKKGVLILSEFAGAAQSLGAGAILVNPWNITEVADSIKHALTMTSDEREKRHRHNYAHVTTHTAQDWAETFVCELNDTVAEALMRTRQVPPDLPSRTAIQQYLQSKNRLLILGFNSTLTEPVESSGRRGGDQVKEMELKLHPDLKGPLRALCEDESTTVIVLSGSDRSVLDENFGEFNLWLAAEHGMFLRPTDGEWMTTMPEHLNMDWVDSAKHVFEYFTERTPRSHFEHRETSFVWNYKYADVEFGRLQARDMLQHLWTGPISNAAVDVVQGSRSVEVRSVGVTKGAAIDRILGEIVHSKSMVTPIDYVLCIGHFLGKDEDIYVFFDPEYPSEPKVKPDGASVSVDRRQNGRPSNGRSNSRNSQARTQKPQVAPPPPERSSSSSDHSTANNNSHHDWREGSSVLDLNGDNYFSCAVGRKRSNARYLLNSSEDVVSFLKEMAESTTPRAGGLPPGAAADYMFLDRQ

SEQ ID NO: 296 - protein, 474 aa, Escherichia coli
MSRLVVVSNRIAPPDEHAASAGGLAVGILGALKAAGGLWFGWSGETGNEDQPLKKVKKGNITWASFNLSEQDLDEYYNQFSNAVLWPAFHYRLDLVQFQRPAWDGYLRVNALLADKLLPLLQDDDIIWIHDYHLLPFAHELRKRGVNNRIGFFLHIPFPTPEIFNALPTYDTLLEQLCDYDLLGFQTENDRLAFLDCLSNLTRVTTRSAKSHTAWGKAFRTEVYPIGIEPKEIAKQAAGPLPPKLAQLKAELKNVQNIFSVERLDYSKGLPERFLAYEALLEKYPQHHGKIRYTQIAPTSRGDVQAYQDIRHQLENEAGRINGKYGQLGWTPLYYLNQHFDRKLLMKIFRYSDVGLVTPLRDGMNLVAKEYVAAQDPANPGVLVLSQFAGAANELTSALIVNPYDRDEVAAALDRALTMSLAERISRHAEMLDVIVKNDINHWQECFISDLKQIVPRSAESQQRDKVATFPKLA

SEQ ID NO: 297 - protein, 495 aa, Saccharomyces cerevisiae
MTTDNAKAQLTSSSGGNIIVVSNRLPVTITKNSSTGQYEYAMSSGGLVTALEGLKKTYTFKWFGWPGLEIPDDEKDQVRKDLLEKFNAVPIFLSDEIADLHYNGFSNSILWPLFHYHPGEINFDENAWLAYNEANQTFTNEIAKTMNHNDLIWVHDYHLMLVPEMLRVKIHEKQLQNVKVGWFLHTPFPSSEIYRILPVRQEILKGVLSCDLVGFHTYDYARHFLSSVQRVLNVNTLPNGVEYQGRFVNVGAFPIGIDVDKFTDGLKKESVQKRIQQLKETFKGCKIIVGVDRLDYIKGVPQKLHAMEVFLNEHPEWRGKVVLVQVAVPSRGDVEEYQYLRSVVNELVGRINGQFGTVEFVPIHFMHKSIPFEELISLYAVSDVCLVSSTRDGMNLVSYEYIACQEEKKGSLILSEFTGAAQSLNGAIIVNPWNTDDLSDAINEALTLPDVKKEVNWEKLYKYISKYTSAFWGENFVHELYSTSSSSTSSSATKN

SEQ ID NO: 298 - DNA, 1134 bp, Arabidopsis thaliana
ggccggccaatgactaaccagaatgtcatcgtttccgacaggaaacccatcttgggtttgaaaaccatcactgtctctgtctctaactctcctctgttctctaattcctttcccacttactttaacttccctcgtcgaaagctcttgaaacttcttgaagcagccgacaaaaacaacttagttgttgctccaaagattacgtctatgatcgattccatgcgtgattcttcccctacacgtctcagatcctcttcctatgactctgtttcagataacgacgacaaaacatcttggatcgttcgttttccttcggctttaaatatgtttgatgagattgtgaatgctgcgaaagggaaacagattgtcatgtttcttgattacgacggaactctttctcccatagttgaagatcccgacaaagctttcataacccatgagatgagagaagtcgtaaaagacgtggcttcgaatttcccgactgctattgtcaccgggagatccattgagaaggttcgtagttttgtccaagtaaacgagatttactacgccggaagccacggcatggacattgaaggtccgaccaacgaaaatagtaacggccagagtaatgaaagagtgctattccaacctgctcgtgaatttttaccgatgatcgagaaggtggttaatattttagaggaaaaaacaaaatggatccctggggctatggtggagaacaacaagttttgtctgtccgtacattttcgacgtgttgatgagaagagatggcctgcattagctgaagtagtaaaatcagttcttattgattatccaaagctgaaactaacccaaggtagaaaggtacttgaaatccgccccacaatcaaatgggacaagggccaggcactcaattttttactaaaatcattaggatatgaaaattcggatgatgttgtgccggtgtatatcggggatgaccgtactgacgaagatgcgtttaaggttctacgtgaaaggggacaaggttttgggattcttgtctcaaaagtaccaaaggacaccaatgcctcttattctcttcaagacccttctcaggttaacaagtttctggaacgtttagtagaatggaagaggaagacagtgggagaagagtga

SEQ ID NO: 299 - protein, 377 aa, Arabidopsis thaliana
GRPMTNQNVIVSDRKPILGLKTITVSVSNSPLFSNSFPTYFNFPRRKLLKLLEAADKNNLVVAPKITSMIDSMRDSSPTRLRSSSYDSVSDNDDKTSWIVRFPSALNMFDEIVNAAKGKQIVMFLDYDGTLSPIVEDPDKAFITHEMREVVKDVASNFPTAIVTGRSIEKVRSFVQVNEIYYAGSHGMDIEGPTNENSNGQSNERVLFQPAREFLPMIEKVVNILEEKTKWIPGAMVENNKFCLSVHFRRVDEKRWPALAEVVKSVLIDYPKLKLTQGRKVLEIRPTIKWDKGQALNFLLKSLGYENSDDVVPVYIGDDRTDEDAFKVLRERGQGFGILVSKVPKDTNASYSLQDPSQVNKFLERLVEWKRKTVGEE

SEQ ID NO: 300 - DNA, 1125 bp, Arabidopsis thaliana
atgactaaccagaatgtcatcgtttccgacaggaaacccatcttgggtttgaaaaccatcactgtctctgtctctaactctcctctgttctctaattcctttcccacttactttaacttccctcgtcgaaagctcttgaaacttcttgaagcagccgacaaaaacaacttagttgttgctccaaagattacgtctatgatcgattccatgcgtgattcttcccctacacgtctcagatcctcttcctatgactctgtttcagataacgacgacaaaacatcttggatcgttcgttttccttcggctttaaatatgtttgatgagattgtgaatgctgcgaaagggaaacagattgtcatgtttcttgattacgacggaactctttctcccatagttgaagatcccgacaaagctttcataacccatgagatgagagaagtcgtaaaagacgtggcttcgaatttcccgactgctattgtcaccgggagatccattgagaaggttcgtagttttgtccaagtaaacgagatttactacgccggaagccacggcatggacattgaaggtccgaccaacgaaaatagtaacggccagagtaatgaaagagtgctattccaacctgctcgtgaatttttaccgatgatcgagaaggtggttaatattttagaggaaaaaacaaaatggatccctggggctatggtggagaacaacaagttttgtctgtccgtacattttcgacgtgttgatgagaagagatggcctgcattagctgaagtagtaaaatcagttcttattgattatccaaagctgaaactaacccaaggtagaaaggtacttgaaatccgccccacaatcaaatgggacaagggccaggcactcaattttttactaaaatcattaggatatgaaaattcggatgatgttgtgccggtgtatatcggggatgaccgtactgacgaagatgcgtttaaggttttacgtgaaaggggacaaggttttgggattcttgtctcaaaagtaccaaaggacaccaatgcctcttattctcttcaagacccttctcaggttaacaagtttctggaacgtttagtagaatggaagaggaagacagtgggagaagagtga

SEQ ID NO: 301 - protein, 374 aa, Arabidopsis thaliana
MTNQNVIVSDRKPILGLKTITVSVSNSPLFSNSFPTYFNFPRRKLLKLLEAADKNNLVVAPKITSMIDSMRDSSPTRLRSSSYDSVSDNDDKTSWIVRFPSALNMFDEIVNAAKGKQIVMFLDYDGTLSPIVEDPDKAFITHEMREVVKDVASNFPTAIVTGRSIEKVRSFVQVNEIYYAGSHGMDIEGPTNENSNGQSNERVLFQPAREFLPMIEKVVNILEEKTKWIPGAMVENNKFCLSVHFRRVDEKRWPALAEVVKSVLIDYPKLKLTQGRKVLEIRPTIKWDKGQALNFLLKSLGYENSDDVVPVYIGDDRTDEDAFKVLRERGQGFGILVSKVPKDTNASYSLQDPSQVNKFLERLVEWKRKTVGEE

SEQ ID NO: 302 - DNA, 963 bp, Arabidopsis thaliana
atgaagattacggatatttccggaaagatcgagactttggttgattccttaagggatatgtccccgacccgtgtcagatcttccttctctgatgaacatgtatccgagaacgatgacgagagaagctcctggattgctcttcatccgtcagcattggatatgttcgaacaaatcatgcgtgatgctgaaggcaaacaaattattatgtttcttgattacgacggaactctctcgctaatcactgaagatcacgacagagcctacataaccgacgagatgcgagaagttgtaaaggaagtggctacatatttcaagacagcgatcatcagcggacgaagcactgacaaagtacagagttttgtgaaactcactggtattcactacgctgggagccacggcatggacattaagggtccgacaaataccgatcagagtaaccaagaagaagtgatgtttcaacctgcaagtgactatttaccgatgattgacgaggtggttaatgttttgaaggaaaagacaaaatctatccctggagctacggtcgagcacaacaagttttgtctaacagtacattttcgtcgggtcgatgaaacgggatgggctgcattagctgagcaagtgagattggttctcattgattatccgaaattgagactgacacaaggcagaaaggtcttagaactccgaccttccatcaaatgggacaagggaaaggctctcgaatttttgctaaactcattagggatagcagaatctaaagatgttttaccggtttacattggagatgaccgtactgatgaagatgcatttaaggttttatgtgaaaggggacaaggttttgggattatcgtctcaaaaactattaaggaaacgtacgcctcttactctcttcaagacccatctcaggttaaagaatttctggagcgtttggtaaagtggaagaaacaaacacttggagaataa

SEQ ID NO: 303 - protein, 320 aa, Arabidopsis thaliana
MKITDISGKIETLVDSLRDMSPTRVRSSFSDEHVSENDDERSSWIALHPSALDMFEQIMRDAEGKQIIMFLDYDGTLSLITEDHDRAYITDEMREVVKEVATYFKTAIISGRSTDKVQSFVKLTGIHYAGSHGMDIKGPTNTDQSNQEEVMFQPASDYLPMIDEVVNVLKEKTKSIPGATVEHNKFCLTVHFRRVDETGWAALAEQVRLVLIDYPKLRLTQGRKVLELRPSIKWDKGKALEFLLNSLGIAESKDVLPVYIGDDRTDEDAFKVLCERGQGFGIIVSKTIKETYASYSLQDPSQVKEFLERLVKWKKQTLGE

SEQ ID NO: 304 - DNA, 1110 bp, Arabidopsis thaliana
atgacaaaccataatgccttaatctctgatgctaaaggcagcatcggagttgcggttagagttccaaaccaatctctgttttctcccggaggtggccgatacatcagcattccccggaagaaactcgtgcagaagctagaggccgacccgagtcaaacccgtatccacacttggatcgaagccatgagggcttcttccccaacccgtacccgaccggggaacatatctcccctcccggagtccgatgaggaggatgaatactcttcttggatggctcaacacccgtcagctttaaccatgtttgaagagatagctgaagcttcaaaagggaaacaaatcgtgatgtttctcgactatgacggtacattatcccccattgttgaaaaccctgatcgagcttacatgtctgaagagatgagagaggcagtgaaaggcgtggctagatatttcccgaccgcgattgtcactggaagatgccgtgataaggttcgtagatttgtgaaacttcccggactttactatgcaggtagccatggaatggacatcaaaggaccttccaaaagaaacaaacataacaagaacaataaaggagttcttttccaagcggcgaatgagtttttgcctatgattgacaaggtctctaagtgtctagtagagaaaatgagagacatagaaggagcaaacgtcgagaacaacaagttttgtgtctccgtacattaccgttgtgttgatcaaaaggactggggattggtagcggaacacgtgacatcgatattgagtgagtatccgaaactgaggttgacacaaggaagaaaagtcttagagattcgaccaaccatcaaatgggataaaggcaaagctctcgagttcttgctcgaatccttaggattcgctaactctaacgatgttttgcccatctatataggagatgatcgtacggacgaggatgctttcaaggttttgagaaacaaaggacaaggctttggtatacttgtgtccaaaattccaaaggaaacgagtgctacatattctctacaagaaccttccgaggtaggagagtttttgcagcgactcgtggaatggaaacaaatgtcactaagaggaagatag

SEQ ID NO: 305 - protein, 369 aa, Arabidopsis thaliana
MTNHNALISDAKGSIGVAVRVPNQSLFSPGGGRYISIPRKKLVQKLEADPSQTRIHTWIEAMRASSPTRTRPGNISPLPESDEEDEYSSWMAQHPSALTMFEEIAEASKGKQIVMFLDYDGTLSPIVENPDRAYMSEEMREAVKGVARYFPTAIVTGRCRDKVRRFVKLPGLYYAGSHGMDIKGPSKRNKHNKNNKGVLFQAANEFLPMIDKVSKCLVEKMRDIEGANVENNKFCVSVHYRCVDQKDWGLVAEHVTSILSEYPKLRLTQGRKVLEIRPTIKWDKGKALEFLLESLGFANSNDVLPIYIGDDRTDEDAFKVLRNKGQGFGILVSKIPKETSATYSLQEPSEVGEFLQRLVEWKQMSLRGR

SEQ ID NO: 306 - DNA, 1065 bp, Arabidopsis thaliana
atggttagattcatcgaagaaaatattactaaaatgttggagacaaaggccatctcaaactcggaggttttatatgtcggaggagacgacggagacacgtcaccaacgacgaaagttcttcatgattttcagatcaacagcggaggaggactgataagatcatgggttgattctatgagagcttgttctcctactcgccctaaatccttcaatagccaatcttgttggattaaggaacatccatctgctttgaacatgttcgaagaaatacttcataaatctgaaggaaaacaaatagttatgtttcttgattatgatggtactctctctcccattgttgatgatcctgatcgagctttcatgtccaagaagatgcgaaatactgtgaggaaacttgcaaagtgttttccaacagccatagttagtgggagatgcagagagaaggtttctagttttgtgaaattaactgagttatactacgctggaagtcatggcatggacatcaaaggaccagagcaaggatctaaatacaagaaagaaaatcagtctcttctttgtcaacccgcaactgaattcctcccggtgataaacgaggtttataaaaaactagtcgagaacactcaatcgattccaggagcgaaagttgagaacaacaaattttgtgcgtctgttcactttcgatgcgtagaagaaaataaatggagtgacttggcccatcaagttcgatcagtcttgaagaattaccccaagctcatgcttacccaaggaagaaaagtattggagattcgtccaatcattaagtgggataaaggcaaagcactcgagtttttgttagaatcactaggatatgataattgtaccgatgtttttcctatatatattggagatgatcgtaccgacgaagacgcctttaagatactgagagacaaaaaacaaggtcttggaattcttgtgtccaaatacgcaaaggagactaatgcttcttattctttgcaagagccagatgaggttatggtttttttagaacgtttggtggaatggaaacagtcaaggtgtggggcatga

SEQ ID NO: 307 - protein, 354 aa, Arabidopsis thaliana
MVRFIEENITKMLETKAISNSEVLYVGGDDGDTSPTTKVLHDFQINSGGGLIRSWVDSMRACSPTRPKSFNSQSCWIKEHPSALNMFEEILHKSEGKQIVMFLDYDGTLSPIVDDPDRAFMSKKMRNTVRKLAKCFPTAIVSGRCREKVSSFVKLTELYYAGSHGMDIKGPEQGSKYKKENQSLLCQPATEFLPVINEVYKKLVENTQSIPGAKVENNKFCASVHFRCVEENKWSDLAHQVRSVLKNYPKLMLTQGRKVLEIRPIIKWDKGKALEFLLESLGYDNCTDVFPIYIGDDRTDEDAFKILRDKKQGLGILVSKYAKETNASYSLQEPDEVMVFLERLVEWKQSRCGA

SEQ ID NO: 308 - DNA, 1050 bp, Arabidopsis thaliana
atggttagattcatagaagaaaacacaaaacttgtagaaaaagaaaccgggaacaaatcaaacaacgatgtaacaacaacgaagaagaaagctcttcaagatatcattatcaacaatggagtaggattgatcaattcatgggttgattcaatgagagcttgttcccctactcatcttaaatctttgttgaaacaaagctcttggctcacggaacatccatcagctttggatatgtttgaagagattcttcacctttctgaaggaaaacaaatcgttatgttcttggattatgatggcactttatctcccattgttgatgatccagatcgagctttcatgtctagaaagatgagaagaactgtgaggaaactagcaaactgtttcccgacggccatagttagtgggagatgcatagaaaaggtttataactttgtaaaactaactgagttgtactatgctggaagtcatggaatggacatcaaaggaccagagcaagggtccaaatatgagcaaattttacaggatagtaaatctcttctttgccaaccagctacagagttcctccccatgatcgacgaggtttatcataaattagtggagaaaacaaaatctactcccggagcccaagtagagaacaacaaattttgtgtctctgttcacttccgacgcgtagatgaaaataactggagtgatttggctaaccaagttcgatcagtaatgaaagactaccctaagctccgtcttactcaaggaagaaaagttttggaggttcgtccgattattaaatgggacaaaggcaaagcactcgagtttttattagagtcacttggatacgctaattgtaccgacgttttccctctttatatcggagatgatcgcaccgacgaagatgcattcaaggtattgagagaacgaagacaaggtcttggcattcttgtatctaaatttccaaaggagactagcgcgtcttattcactgcaagaacccgatgaggttatggagttcttgcaacgtttagtggaatggaaacaattgagatctggagcatga

SEQ ID NO: 309 - protein, 349 aa, Arabidopsis thaliana
MVRFIEENTKLVEKETGNKSNNDVTTTKKKALQDIIINNGVGLINSWVDSMRACSPTHLKSLLKQSSWLTEHPSALDMFEEILHLSEGKQIVMFLDYDGTLSPIVDDPDRAFMSRKMRRTVRKLANCFPTAIVSGRCIEKVYNFVKLTELYYAGSHGMDIKGPEQGSKYEQILQDSKSLLCQPATEFLPMIDEVYHKLVEKTKSTPGAQVENNKFCVSVHFRRVDENNWSDLANQVRSVMKDYPKLRLTQGRKVLEVRPIIKWDKGKALEFLLESLGYANCTDVFPLYIGDDRTDEDAFKVLRERRQGLGILVSKFPKETSASYSLQEPDEVMEFLQRLVEWKQLRSGA

SEQ ID NO: 310 - DNA, 1110 bp, Arabidopsis thaliana
atgtcagctagtcaaaacattgtcgtatcagagactacaatgtcaagtatcatccccaacaacaacaacaacaacaacaactcttcttcacagaaactccctccttgtttaatctcaatttccaagaaaaagcttctcaagaacatcgacatcatcaatggtggtggacaaagaatcaacgcttgggtagattcaatgcgtgcttcttctcctactcatctcaaatctcttccttcttctatctccacacagcaacaactcaactcatggatcatgcaacatccttcagcactagaaaaattcgaacagataatggaagcttcgagagggaaacaaatcgtaatgtttcttgattatgacggtactctctctcccattgttgatgatccagacaaagctttcatgtcaagcaagatgagaagaacagtgaaaaaactggctaagtgtttccccactgctatagttactggtagatgcatagacaaggtgtataactttgtgaagcttgctgagctgtattatgctggaagccatggcatggacattaaaggtccagcaaaaggcttctccagacacaagagggttaaacagtctcttctgtaccaaccagctaatgactatcttcccatgatcgatgaagtttatagacaactcttggaaaaaacaaaatcgactccaggagccaaagtagaaaaccacaagttttgtgcttctgtgcactttcgctgcgtcgatgagaagaaatggagcgaactggttctacaggttcggtcggtattaaagaaattccctacgctgcaactgacccaaggtcggaaggttttcgaaatccgtccaatgattgaatgggataaaggaaaggctcttgagttcttgttagaatcacttggatttgggaacactaacaatgttttcccggtttatattggtgacgatcgaactgacgaagatgcatttaagatgctacgagacagaggcgaaggctttggcattcttgtctccaagtttcccaaggatactgatgcttcgtattctttgcaagatccatccgaggtgatggatttcttacgacgattggtggaatggaaacaaatgcagccaagaatgtga

SEQ ID NO: 311 - protein, 369 aa, Arabidopsis thaliana
MSASQNIVVSETTMSSIIPNNNNNNNNSSSQKLPPCLISISKKKLLKNIDIINGGGQRINAWVDSMRASSPTHLKSLPSSISTQQQLNSWIMQHPSALEKFEQIMEASRGKQIVMFLDYDGTLSPIVDDPDKAFMSSKMRRTVKKLAKCFPTAIVTGRCIDKVYNFVKLAELYYAGSHGMDIKGPAKGFSRHKRVKQSLLYQPANDYLPMIDEVYRQLLEKTKSTPGAKVENHKFCASVHFRCVDEKKWSELVLQVRSVLKKFPTLQLTQGRKVFEIRPMIEWDKGKALEFLLESLGFGNTNNVFPVYIGDDRTDEDAFKMLRDRGEGFGILVSKFPKDTDASYSLQDPSEVMDFLRRLVEWKQMQPRM

SEQ ID NO: 312 - DNA, 1113 bp, Arabidopsis thaliana
atggtgagccaaaacgtcgtcgtatcagacgccaagaccgggatcataacggtctctacagtctctaactcctctgtctttactcctaccgctcaaaaaccaccgactgctcctggttacatctcagtttccaagaaaaaactcctcaaaaaccttgaaatcaatggagctgatcaaagtcaaagacttaactcttgggttgactccatgagagcttcttctcctacccatctcaaatcactttcctctttctcttccgaagaagaacacaattcttggatcaaacgacatccatcagcacttaacatgttcgaacgaatcatcgaagaagcaagaggaaaacaaatcgtcatgtttcttgattatgacggtactctttctccgatcgtggatgatccagacagagctttcatgactagcaagatgagaagaacagtgaaaaaaatggctaagtgttttccaacttccatagttactggtagatgcatcgacaaggtttatagctttgtgaagctagcagaactgtattatgctggaagccatgggatggatattaaaggcccaactaaaggtttctcaagatacaataaggataaaccatccgttctttaccaaccagccggcgactttcttcccatgatcgatgaggtttataaacaattagtggagaaaaccaaatctacaccaggagccaaagtggagaacaacaagttctgtctttctgtgcacttccgttgtgttgacgagaagaaatggagcgagctggcttcaaaagttcggtcggtggtaaagaactatccgacgttgaaactgtctcaaggtcgaaaggtttttgaaatccgacctataattaaatggaacaaaggcaaggctcttgagtttttgttagagtcactcggatttgaaaactgtaacgatgtatttccaatttacattggtgatgataaaaccgatgaagatgcatttaagctactacgagggagaggacaaggctttggtattcttgtctccaagttccccaaagacaccagtgcgtcgtattctttacaagacccacctgaggtgatgaatttcttgggacggttggtggagtggaaacagatgcagcaataa

SEQ ID NO: 313 - protein, 370 aa, Arabidopsis thaliana
MVSQNVVVSDAKTGIITVSTVSNSSVFTPTAQKPPTAPGYISVSKKKLLKNLEINGADQSQRLNSWVDSMRASSPTHLKSLSSFSSEEEHNSWIKRHPSALNMFERIIEEARGKQIVMFLDYDGTLSPIVDDPDRAFMTSKMRRTVKKMAKCFPTSIVTGRCIDKVYSFVKLAELYYAGSHGMDIKGPTKGFSRYNKDKPSVLYQPAGDFLPMIDEVYKQLVEKTKSTPGAKVENNKFCLSVHFRCVDEKKWSELASKVRSVVKNYPTLKLSQGRKVFEIRPIIKWNKGKALEFLLESLGFENCNDVFPIYIGDDKTDEDAFKLLRGRGQGFGILVSKFPKDTSASYSLQDPPEVMNFLGRLVEWKQMQQ

SEQ ID NO: 314 - DNA, 1080 bp, Brassica napus
atggtgagattcatcgaagagaatattactaaaatgttggagacaaagatcatctctaagtcggaagttttatatgctggaggagacgacggagacacgtcgccggcgactaaaatttttcaagattttcagatcaacgaagaagacgtcggaagaggaggagggctaataagatcatgggttgattccatgagagcatgttctcctactcatctcaaacctttcgacaaccaatcttcttggatcaaagaacatccatcagctttgaacatgttcgaagaaatacttcatgaatcagaaggaaaacaaatcgtcatgtttcttgattacgatggtactctctcccccattgttgatgatcctgatcgcgctttcatgtctaacaagatgcgaaacactgtaaggaaacttgcaatgtgttttccaacagtcatagttagtgggcgatctagagagaaggtttatagttttgtgaaactaactgagttgtactatgctggaagtcacggaatggacatcaaaggaccagagcaaaattccaaatacaaaaaaaaaacccaatctcttctttgtcaacccgcgacggagttccttccggtgattagtgaggtgtatatgaaactagtcgagaaaacaaaatcgattcaaggagccaaagttgaaaacaacaaattttgtgcttctgttcactttcgatgcgtagacgaaaataaatggagtgacttggcccatctagttcgatcagttctgaagaactaccccaagctcatgcttacgcaaggaagaaaagtgttggagattcgtccaatcattaaatgggacaaaggcaaagcacttgagttcttgttagaatccctcggatatgagaattgtacccatgtcttccctatatatattggagatgatcgtaccgacgaagatgcctttaagattttgagagataaaagacaaggtcttgggatccttgtatccaaatacgcgaaggagaccaatgcttcttattctttgcaggagccagacgaggttatggattttttggaacgtctggtggaatggaaaaagttaaagagtggggaatga

SEQ ID NO: 315 - protein, 359 aa, Brassica napus
MVRFIEENITKMLETKIISKSEVLYAGGDDGDTSPATKIFQDFQINEEDVGRGGGLIRSWVDSMRACSPTHLKPFDNQSSWIKEHPSALNMFEEILHESEGKQIVMFLDYDGTLSPIVDDPDRAFMSNKMRNTVRKLAMCFPTVIVSGRSREKVYSFVKLTELYYAGSHGMDIKGPEQNSKYKKKTQSLLCQPATEFLPVISEVYMKLVEKTKSIQGAKVENNKFCASVHFRCVDENKWSDLAHLVRSVLKNYPKLMLTQGRKVLEIRPIIKWDKGKALEFLLESLGYENCTHVFPIYIGDDRTDEDAFKILRDKRQGLGILVSKYAKETNASYSLQEPDEVMDFLERLVEWKKLKSGE

SEQ ID NO: 316 - DNA, 1128 bp, Brassica napus
atggtgagttttgtcatggagaaaccacacaggatgtcagagagtcaaaacgttgtcgtctcagaggcggcaaggtctatcatccccaacaactcttcggctcctcctggtttcatctcaatctccaagaaaaagcttctcaagaacctagaaatcatcaatgatggcgaaagaatcaacgcttgggtagattcaatgcgagcttcttctcctactcatccaaaatcactcccttcttccatctcctcagagcaacaactcagttcatggatcatgcagcatccttctgcgttagaaatgtttgagaaaatcacagaagcttcgggagggaaacaaatagtaatatttctagattatgacggtactctctctcccatcgttgatgatccagacagagctttcatgtcaagcaagatgagaagaacagtaaaaaaactggctaagtgttttccaactgctatagttactggtagatgcctagacaaggtgtataactttgtcaagctagctgagctgtattatgctggcagccatggcatggacattaaagggccagcaaaaggcttctccagacacaagagggttaaacagtctcttctgtaccaaccagccagtgactatcttcccatgatcgatgaagtctatagacaacttttggagaaaaccaaatcaactcctggagtcatagtagaaaacaacaagttctgtgcttctgtgcactttcgttgcgtcgatgagaagaaatggagcgaactggttctacaggttcggtcggtattaaaggaataccctaggcttaaactgaaccaaggtcgaaaggttttcgaaatacgtcctatgattgaatgggataaaggaaaagctcttgagttcttgttagagtcacttgggtttggaaactctaacaacgttttcccagtttacatcggtgatgaccggaccgacgaagatgcatttaagctgctacgagacagaggtgaaggctgtggcgttcttgtctccaaattccccaaagatacggatgcttcatattatttgcaagatccgtccgaggtgatgaatttcttgcaacgattggtggcgtggaaacaaatgcagccaaagagtgtgaagaggatgtatgtataa

SEQ ID NO: 317 - protein, 375 aa, Brassica napus
MVSFVMEKPHRMSESQNVVVSEAARSIIPNNSSAPPGFISISKKKLLKNLEIINDGERINAWVDSMRASSPTHPKSLPSSISSEQQLSSWIMQHPSALEMFEKITEASGGKQIVIFLDYDGTLSPIVDDPDRAFMSSKMRRTVKKLAKCFPTAIVTGRCLDKVYNFVKLAELYYAGSHGMDIKGPAKGFSRHKRVKQSLLYQPASDYLPMIDEVYRQLLEKTKSTPGVIVENNKFCASVHFRCVDEKKWSELVLQVRSVLKEYPRLKLNQGRKVFEIRPMIEWDKGKALEFLLESLGFGNSNNVFPVYIGDDRTDEDAFKLLRDRGEGCGVLVSKFPKDTDASYYLQDPSEVMNFLQRLVAWKQMQPKSVKRMYV

SEQ ID NO: 318 - DNA, 1101 bp, Brassica napus
atggtgagccaaaacgtcgtcgtatcagacgccaatacaggaatcataaccgtctccaactcctccgtctttgctccttccgctcaaaaaccaccgactgttcctggtcacatctcaatttccaagaagaaactactcaagaacctagaactcagtggcgctcaaagtcaaagactcaactcttgggttgactccatgagagcttcttctcctactcatctcaaatcactttcttctctttcatcagaagaagagctcaattcttggcttaaacgacatccatcggctcttgacatgtttgaaagaatcatcgaaacttcaagaggaaaacagatcgttatgtttcttgactatgacggtactctttctccaatcgtcgctgatccagacagagcttttataaccagcaagatgagaagaacagtgaaaaaactggccaagtcctttccaacttctatagttactggtagatgcatagacaaggtgtatagctttgtgaagctagcagaactgtattatgctggtagccatggaatggatattaaaggtccaacaaaaggtttctccagatacaataaggataaaccatctgttctttatcaaccagctggagactttcttcccatgatcgatgaggtttttaaacaattagtggagaaaaccaaatcaacaccaggagccaaagtggagaacaacaagttctgtctttctgtacacttccgttgcgtcgatgagaagaaatggagcgacctggctttaaaagttcggtcggtggtaaagaactatccgacattgaaactgtcccaaggtcggaaggtttttgaaatccgacctatgattaaatgggacaaaggcaaggctcttgagtttttgttagagtcacttggatttgagaactctaacgatgtatttccgatatacattggtgacgatcgaaccgatgaagatgcttttaagctgcttcaagagagaggacaaggcttcggcattcttgtctccaaatttcccaaagacactaatgcatcgtattctttgcaagatccacccgaggtgatggatttcttgcgacggttggtggagtggaaacaaattcaacaatga

SEQ ID NO: 319 - protein, 366 aa, Brassica napus
MVSQNVVVSDANTGIITVSNSSVFAPSAQKPPTVPGHISISKKKLLKNLELSGAQSQRLNSWVDSMRASSPTHLKSLSSLSSEEELNSWLKRHPSALDMFERIIETSRGKQIVMFLDYDGTLSPIVADPDRAFITSKMRRTVKKLAKSFPTSIVTGRCIDKVYSFVKLAELYYAGSHGMDIKGPTKGFSRYNKDKPSVLYQPAGDFLPMIDEVFKQLVEKTKSTPGAKVENNKFCLSVHFRCVDEKKWSDLALKVRSVVKNYPTLKLSQGRKVFEIRPMIKWDKGKALEFLLESLGFENSNDVFPIYIGDDRTDEDAFKLLQERGQGFGILVSKFPKDTNASYSLQDPPEVMDFLRRLVEWKQIQQ

SEQ ID NO: 320 - DNA, 1146 bp, Glycine max
atgatgacgaaccaaaatgtggtgactcatgaggttattaacacgttgattgccgtggcagcttccatttcaaactcaaccgcgttgccaagtgcaacagtgccagaatccatggctgtgcttggtgggttttgggggctgccccataataaaaatcttgtgaaaaggttggaaggagctaaagttagtgcttggattgattcaatgagagcttcttccccaactcgtgccaaatcagaaagccaagaaaaaagatcttggattctttatcacccttcagctctgaacacgtttgagcaaatagtatgtagtgccaaaggaaagcaagtcgtagtttttcttgactacgatggaactctctccccaattgttgcagatccggataaagctttcatgactagaaagatgagagcaacgctaaagggcatagcaaggcattttcccacagcaatagtgaccggaaggtgcagagacaaggtatataactttgtaaaattggcagaactttactatgccggaagccatggcatggacatcaagggtccaacaaaaagccaaagtccaaagcaaggtaataataataaagcagtgctgttccaacccgcgagtcaattcctgccaatgatcgatgaggtgtacaagatcttgttagaaaaaacaaagactgtcccaggggctaatgttgagaacaataagttttgcttgtccgtgcactttcgttgtgttgacgaaaagagttgggcagcgttggcggagaaagttagattggtgctcaatgattacccacaacttaggctaacccaagggagaaaagtgctagagattcgtccaaccatcaaatgggacaagggcaaggctcttgaatttttgttagaatcattaggatacgagaattcgaatgatgtatttccaatatatattggtgatgatcgaactgatgaggatgcttttaaggttttgcgcagtaggggtcaaggaattgggattcttgtttctagagttgcaaaagaaacagatgcttcctataccttgcaagatccatcagaggcaagtgctatatattccatccagtacaatttattctatataatatttttaatgtttaattcgggcatcaatgttgtatatctttattgtgaatggtga

SEQ ID NO: 321 - protein, 381 aa, Glycine max
MMTNQNVVTHEVINTLIAVAASISNSTALPSATVPESMAVLGGFWGLPHNKNLVKRLEGAKVSAWIDSMRASSPTRAKSESQEKRSWILYHPSALNTFEQIVCSAKGKQVVVFLDYDGTLSPIVADPDKAFMTRKMRATLKGIARHFPTAIVTGRCRDKVYNFVKLAELYYAGSHGMDIKGPTKSQSPKQGNNNKAVLFQPASQFLPMIDEVYKILLEKTKTVPGANVENNKFCLSVHFRCVDEKSWAALAEKVRLVLNDYPQLRLTQGRKVLEIRPTIKWDKGKALEFLLESLGYENSNDVFPIYIGDDRTDEDAFKVLRSRGQGIGILVSRVAKETDASYTLQDPSEASAIYSIQYNLFYIIFLMFNSGINVVYLYCEW

SEQ ID NO: 322 - DNA, 1119 bp, Glycine max
atgacgaaccgtaatgtgaataacacccttgtggagttggcaatgtcgatttcaaacacaagtgctctacctagagctacggtgcctggaataatggccttgcttggtggggttttgggcctaccccagaagaagctcttaatgaaaactttggaagatggaagtgttaataaaggagggaccaaagttattaacacatggattgattcaatgagagcctcttctcccacacgagtcaaatccacacaaaaccaagacccaacaagtccttggacactttaccacccttcggcactgagcatgtttgatcagattgtatgtgagtccaaaggaaagcagattgtgacttttcttgactatgatggaactctctccccaattgttgcagatccagataaagcatacatgagtaaaaagatgaggaccacattgaaggacttagcaaggcatttccccactgccatcgtgagtggaaggtgcctagacaaggtgtataactttgtaagattggcagaactgtactatgctgggagccatggaatggacatcaagggaccaacaaataagcgaagtactaagaaggaaaatgaacaagtgctcttccaacccgctagtgaattcttgcccatgatcaatgaggtgtacaacatcttggtggaaaaaacaaagtctgtccctggggctaaggtagaaaataacaagttttgcttgtccgtgcactttcgctgtgttgacgaaaagagttgggtgtcattggctgaacaagtgagcttcgtgctcaacgagtacccaaaacttaagctaactcaagggagaaaagtgcttgagattcgaccaaccataaaatgggacaagggcaaggctcttgaattcttgctagagtcactgggatatgctaattctgataatgtatttccaatctatattggggatgatcgaactgatgaagatgcttttaaggttttacggaggaggggtcatggggttgggattctagtttctaaaattccaaaagaaactgatgcttcctacactttgcaagatccaacagaggttgggcagtttttgaggcatttggtggagtggaaaagaacgagttcccaataccacaagttgtag

SEQ ID NO: 323 - protein, 372 aa, Glycine max
MTNRNVNNTLVELAMSISNTSALPRATVPGIMALLGGVLGLPQKKLLMKTLEDGSVNKGGTKVINTWIDSMRASSPTRVKSTQNQDPTSPWTLYHPSALSMFDQIVCESKGKQIVTFLDYDGTLSPIVADPDKAYMSKKMRTTLKDLARHFPTAIVSGRCLDKVYNFVRLAELYYAGSHGMDIKGPTNKRSTKKENEQVLFQPASEFLPMINEVYNILVEKTKSVPGAKVENNKFCLSVHFRCVDEKSWVSLAEQVSFVLNEYPKLKLTQGRKVLEIRPTIKWDKGKALEFLLESLGYANSDNVFPIYIGDDRTDEDAFKVLRRRGHGVGILVSKIPKETDASYTLQDPTEVGQFLRHLVEWKRTSSQYHKL

SEQ ID NO: 324 - DNA, 1089 bp, Glycine max
atgacgcagaatgcgatagtgtccaagacaaaatcggggatcaaccgggacataaccgtgccacaaaagccactggcggcggcggcggcggcgggggggtacattcccattccgaggaggagggttttgaagaacctggaaatcaatgcatgggttgattccatgagatcctcttctccaaccaattccaaatccacctcttctctcgcagaagaacacagcacttggattcttcgccacccctcagcattagacatgttcgagcaaattatggatgcgtcccggggaaagcaaattgtcatgtttctcgactatgatggtactttgtcgcctattgttgatgacccagaccgtgctttcatgtcggattcgatgaggagaacggtgaggaaacttgcaaggtgttttcctactgctatagttaccggcagatgcaaagacaaggtttacaattttgttcgcttggctgagctatattatgctggaagccatggcatggatattcaagggccaacaagaacctccaaatacagcaacaaagataaaggagagcctgttctttttcaacctgctagtgaatttcttcccatgattgatgaggtgtaccatcaattagttgagaaaatgaaatcaattcctggagccatggtggagaacaacaagttctgctgttctgttcattttcgctgcgttgatgaaaagaaatggagtgaactggcacaggaagtgagatcagtattaaaagagtacccgaagcttcgtcttaaccaaggaaggaaggtattagagattcgtccatctattaaatgggacaaagggaaggcgctggaatttttgttagagtcacttggatttgccaactgtaacgatgtctttcctgtttacattggagatgataaaaccgatgaagatgcattcaagaaattaagagacagaggacaaggttttgggattcttgtctcgaaatttccaaaggacactactgcatcatactctttacaagaaccaaacgaggtgatggatttccttcaacgtttggtggagtggaaacaagtatccctccgactcagaacacgttctcgggtgtaa

SEQ ID NO: 325 - protein, 362 aa, Glycine max
MTQNAIVSKTKSGINRDITVPQKPLAAAAAAGGYIPIPRRRVLKNLEINAWVDSMRSSSPTNSKSTSSLAEEHSTWILRHPSALDMFEQIMDASRGKQIVMFLDYDGTLSPIVDDPDRAFMSDSMRRTVRKLARCFPTAIVTGRCKDKVYNFVRLAELYYAGSHGMDIQGPTRTSKYSNKDKGEPVLFQPASEFLPMIDEVYHQLVEKMKSIPGAMVENNKFCCSVHFRCVDEKKWSELAQEVRSVLKEYPKLRLNQGRKVLEIRPSIKWDKGKALEFLLESLGFANCNDVFPVYIGDDKTDEDAFKKLRDRGQGFGILVSKFPKDTTASYSLQEPNEVMDFLQRLVEWKQVSLRLRTRSRV

SEQ ID NO: 326 - DNA, 1179 bp, Hordeum vulgare
atggcgcagacgagcgtggtcgtgtcagaggtgggcatcacggcgaccgcggccacggccacggcgtgcccctgcccggggtcgctgttcccgtacccgccgccgcgtgccgggatggccgtgagccggaagtgcctgcgggcggcgcaggcggagcttggcgcggggatgctcagtggcctggtcgagtccatgcgggcgtcgtcccccacgcacgccagggccgctgccgccctcgctgccggcgtcgacgacgagcacgcggcctggatggccaggcacccctccgccctggccaagttcgaggagatcgtggccgcctccaaagggaagcagatcgtcatgttcctcgactacgaccgcacactggcccccatcgtcaatgaccccgaccccgccttcatgagcgagacgatgcggatggccgtgcgcagcgtggccaagcacttcccgacggcgatcgtcagtggtcggtgccgcgacaaggtgtttgagttcgtgaagctggcggagctctactacgccggcagccacggcatggacatcaagggcccggccaaatcctcttccgggcacgcaaagtccaaggccaaaggagttctcttccaaccagcaagcgagttcctgcccatgatagaagaggtgcatcaacgcctgatagaggagaccaagcacgtagccggcgccaaggtggagaacaacaagttctgcgtctccgtccacttcagatgcgtcgacgaaaagagctggggcgcgctggcggagacggtgaagggggtgatgcgggagtacccgaagctgcgcatgtcgcaggggcggatggtgttcgaggtgcggcccaccatcaagtgggacaagggcaaggccctcgagttcctgctcgagtcgctgggcttcgccgactgcagcaacgtgctgcccgtctacatcggcgacgaccgcaccgacgaggacgccttcaaggtgctgcggcggaggggccagggcgtcgggatcctcgtctccaagcaccccaaggacaccagcgcgatccttctcgctgcaggagcccgccgaggtcatggagttcctcctccgcctcgtcgagtggaagcagctctccagggcgcgcctcaggctgcggcgacaggcccacgcctgatcggacgaccacgaggatcggccggccgggctaattaa

SEQ ID NO: 327 - protein, 392 aa, Hordeum vulgare
MAQTSVVVSEVGITATAATATACPCPGSLFPYPPPRAGMAVSRKCLRAAQAELGAGMLSGLVESMRASSPTHARAAAALAAGVDDEHAAWMARHPSALAKFEEIVAASKGKQIVMFLDYDRTLAPIVNDPDPAFMSETMRMAVRSVAKHFPTAIVSGRCRDKVFEFVKLAELYYAGSHGMDIKGPAKSSSGHAKSKAKGVLFQPASEFLPMIEEVHQRLIEETKHVAGAKVENNKFCVSVHFRCVDEKSWGALAETVKGVMREYPKLRMSQGRMVFEVRPTIKWDKGKALEFLLESLGFADCSNVLPVYIGDDRTDEDAFKVLRRRGQGVGILVSKHPKDTSAILLAAGARRGHGVPPPPRRVEAALQGAPQAAATGPRLIGRPRGSAGRAN

SEQ ID NO: 328 - DNA, 1104 bp, Oryza sativa
atgacgaaccaggacgtggtggtttctgagatgggcatcgcggcaggcgcggcgctgccgggaggaccggccggcccggcgggcggcctcttcgcgtgccgcagcgcggccgcgtcgatgaggcagacgtacctcgacctcgccgcggcggcggtggcggcgcgctccgcgagctgcaccagctgggccgacgccatgcgcgcctcctcccccacccgctcgtcccgctccgcctccgacgtcgacgagttcaccgcctgggtgaggaagcacccgtcggcgcttagcaagttcgaggagatcgccgccaagtccagggggaagaagatcgtaatgttcatggactacgacggcacgctctctcccatcgtcgccgaccccgacacggcctacatgagcgacgcgatgagggcggcggtgcgcgaagtcgccaagaccttcccgacggcgatcgtcagcgggcggtgccgcgacaaggttcgcaacttcgtcggcctctccgacctctactacgccggcagccatggcatggacatcaagggaccaagctccaacccggagtctgccctttgccagccagcaagcgagttcctccccatgatcgacgaggtgtacaagacgctggtggaaaagacgaaatctacacctggagccaaggtggagaacaacaagttctgcctgtccgtccacttcagatgtgtagatgaaaagagatggaatgctttgggggagcaggtcaaggccgtgatcaaggaatacccaaagttgaagcttacccaaggaaggaaggttttggagatcaggccgagcattgagtgggacaagggcaaggctctggagttcttgcttgaatcgctgggattcgccaactgcggcgacgtcatgccggtgtacatcggtgacgaccgcaccgacgaggacgccttcaaggtgttgagaaagagaggtcagggcctgggaatcctagtctccaagtgccccaaggacaccaacgcctcctactctctccaggacccaacagaggtgatggagttcttgctcaggctggtggagtggaagcggaagtcgtcgtcgtcgtcgttgatgattcgtccgagagtgtag

SEQ ID NO: 329 - protein, 367 aa, Oryza sativa
MTNQDVVVSEMGIAAGAALPGGPAGPAGGLFACRSAAASMRQTYLDLAAAAVAARSASCTSWADAMRASSPTRSSRSASDVDEFTAWVRKHPSALSKFEEIAAKSRGKKIVMFMDYDGTLSPIVADPDTAYMSDAMRAAVREVAKTFPTAIVSGRCRDKVRNFVGLSDLYYAGSHGMDIKGPSSNPESALCQPASEFLPMIDEVYKTLVEKTKSTPGAKVENNKFCLSVHFRCVDEKRWNALGEQVKAVIKEYPKLKLTQGRKVLEIRPSIEWDKGKALEFLLESLGFANCGDVMPVYIGDDRTDEDAFKVLRKRGQGLGILVSKCPKDTNASYSLQDPTEVMEFLLRLVEWKRKSSSSSLMIRPRV

SEQ ID NO: 330 - DNA, 1125 bp, Oryza sativa
atgacgaagcacggcgcggtggttgtcccggaggatgccgtggtggcggcggcggccgtcgggcggcatttctcgttcccgccgccgaggacggggggcgtcggcggcgactcgtgcaagaagctggcggcgcagcagatcgacctcggcgccgcggtgatcgggtcgtggctcgactccatgaaggcgtcctcgccgcggcacaggctcgtggcgcccgcggtcgccgccgccgccgccgacgcggagcacgacgagtggatggagaagcacccgtcggcattggggaagttcgaggcgctggcggcggcggcgaaggggaagcggatcgtcgtcttcctcgactacgacggcacgctgtcgccgatcgtcgaggaccccgaccgcgccgtcatgacggacgagatgagggacgccgtgcgcggcgtggcggcgcgattcccaacggcgatcgtcagcggccgctgcagagacaaggtgttgagcttcgtggggctggaggagctctactacgcgggtagccacgggatggacatccaagggcccaccaacgccgccgcctccaagggaggagaggaggaggaggagtcggtgctgtgccagccggcgagggagttcctgccgatgatcggggaggcgtacgcggcgctggtggagaaggtggagggggtgatcccgggggcgaaggtggagaacaacaagttctgcctctccgtccacttccgccgcgtcgacgagcgccggtggggcgccgtcgccgaccaggtcagggcggtgctccggggctacccgcgcctccgcctcacgcagggccgcaaggtgctcgaggtcaggcccgccatcaagtgggacaagggcgaggccctccgcttcctcctctccgccctcggcttctccgccgccggagacgtagaagacgacggcgacgacgacgacgcgttccccatctacatcggcgacgaccgcaccgacgaggacgcgttccgggtgctccgagcgagggggcacggcgccggcatcctggtgtcgaggttccccaaggacacctgcgcctccttctccctccgcgaccccggcgaggtcaaggacttcctccgcaagctcgtcacctgcgctgccgcatga

SEQ ID NO: 331 - protein, 374 aa, Oryza sativa
MTKHGAVVVPEDAVVAAAAVGRHFSFPPPRTGGVGGDSCKKLAAQQIDLGAAVIGSWLDSMKASSPRHRLVAPAVAAAAADAEHDEWMEKHPSALGKFEALAAAAKGKRIVVFLDYDGTLSPIVEDPDRAVMTDEMRDAVRGVAARFPTAIVSGRCRDKVLSFVGLEELYYAGSHGMDIQGPTNAAASKGGEEEEESVLCQPAREFLPMIGEAYAALVEKVEGVIPGAKVENNKFCLSVHFRRVDERRWGAVADQVRAVLRGYPRLRLTQGRKVLEVRPAIKWDKGEALRFLLSALGFSAAGDVEDDGDDDDAFPIYIGDDRTDEDAFRVLRARGHGAGILVSRFPKDTCASFSLRDPGEVKDFLRKLVTCAAA

SEQ ID NO: 332 - DNA, 1101 bp, Oryza sativa
atgacgaaccacgccggcttcgccgcggacgacgcggtcaccgcggccgtgccggtgcaggcggcgcagggcgggcggcatttcccgccgttcctggcgccgtcgtccaggctcaccgactgcaagaaggcggcggcgcacgtggacctcgccggcgcgggcggggtggcgacggtgcccggatcttggccgcgccacgccaagcccgtctccggcgccgagctcgacgactggatggagaagcacccgtcggcattggcatggttcgagtccgtcgccgccgcggcgaagggcaaggagatcgtcgtgttcctcgactacgacggcaccctctcccccatcgtcgccgaccccgaccgcgccttcatgtccgacgaaatgagagaggcggtgagaggcgtggcgaagcacttcccgacggcgatcgtgagcgggaggtgcatcgacaaggtgttcgactttgtgaagctggaggagctgtactacgccgggagccatggaatggacatcaggggccccaccgcggcagcgtcggagtacaaccacaacatgaaggcaaagcagggtgatgctgttactttccagccggccgccgatttcctgcccgtcatcgaggaggtgtatcatgtgctgaaggagaggatggcgagtataaggggttcgctggtggagaacaacaagttttgcctttccgtgcactaccgctgcgtcgacgaggcggaatggggcgtgctggacggcaaggtgagggcggtgatagagggctacccggatctccgtctcagcaaggggagaaaggtgctggagatccgccctgtcatcgactgggacaaaggctccgcactccagttcctgctcaaatctctcggttatgaggggcgcaacaatgttttcccgatatacattggagatgaccgcaccgacgaggatgctttcaaggtgttgcgcaacatgggacagggcataggaatccttgtgaccaaggtcccaaaggagacagctgcatcctacactctgcgagagccatccgaggtgaaggagttcctgcgcaagttggtgaagattaagatcaacggggacaaagggctgattggcaagtag

SEQ ID NO: 333 - protein, 366 aa, Oryza sativa
MTNHAGFAADDAVTAAVPVQAAQGGRHFPPFLAPSSRLTDCKKAAAHVDLAGAGGVATVPGSWPRHAKPVSGAELDDWMEKHPSALAWFESVAAAAKGKEIVVFLDYDGTLSPIVADPDRAFMSDEMREAVRGVAKHFPTAIVSGRCIDKVFDFVKLEELYYAGSHGMDIRGPTAAASEYNHNMKAKQGDAVTFQPAADFLPVIEEVYHVLKERMASIRGSLVENNKFCLSVHYRCVDEAEWGVLDGKVRAVIEGYPDLRLSKGRKVLEIRPVIDWDKGSALQFLLKSLGYEGRNNVFPIYIGDDRTDEDAFKVLRNMGQGIGILVTKVPKETAASYTLREPSEVKEFLRKLVKIKINGDKGLIGK

SEQ ID NO: 334 - DNA, 1113 bp, Oryza sativa
atgacgaagcagagcgtggtggtgccggaggtggcggtgccgatgccgcccaactccgcgccgctgctcccgtacccgccgccgcgggccgcgccgggcgtcgccgtgcgcaagaagtacctccaggcgcagctcgacctcggcgcgggcctcccgctcatcaacggatgggtggagtccatgcgggcctcctcccccacccacgccaaggccgccgccgcgctcgccgccgccggcgccgtcgacgacgagcgcgccgcctggatggtgaggcacccgtcggcgctgagcaagttcgagcagatcgtggcggcgtccaaggggaagaagatcgtcatgttcctcgactacgacggcacgctgtcccccatcgtcgacgacccggactccgccttcatgtccgacacgatgcggcgggcggtgcgcagcgtcgccaagcacttcccgacggcgatcgtcagcggccggtgccgcgacaaggtgttcgagttcgtgaagctggcggaactctactacgccggtagccatggcatggacatcaagggccccgcgaaggcctcccgccacaacaaggccaaggcgaaaggcgttctctttcagccggctagcgagttcctccccatgatagaacaggtgcacgattctctgatagaaaggaccaagtgcatacctggagccaaggtggagaacaacaagttctgtgtgtctgtccacttcagatgtgtcgatgaaaagagctggagcacattggctgacatagtgaaggcagagctcaaggactaccccaaactgaagctcacgcaggggaggatggtgttcgagatccggcccaccatcaagtgggacaagggcaaggccctcgagttcctcctcgagtcgctagggttcgccgactgcaccaacgtgctgccggtgtacatcggcgacgaccggaccgacgaggacgcgttcaaggtgctccgcaagagaggccagggcatcggcatcctcgtgtccaagtaccccaaggacaccaacgcctcctactccctgcaggagccagccgaggtgatggagttcttgctgcggctggtggagtgggagcgcctctcccgtgctcgccccaagtggtga

SEQ ID NO: 335 - protein, 370 aa, Oryza sativa
MTKQSVVVPEVAVPMPPNSAPLLPYPPPRAAPGVAVRKKYLQAQLDLGAGLPLINGWVESMRASSPTHAKAAAALAAAGAVDDERAAWMVRHPSALSKFEQIVAASKGKKIVMFLDYDGTLSPIVDDPDSAFMSDTMRRAVRSVAKHFPTAIVSGRCRDKVFEFVKLAELYYAGSHGMDIKGPAKASRHNKAKAKGVLFQPASEFLPMIEQVHDSLIERTKCIPGAKVENNKFCVSVHFRCVDEKSWSTLADIVKAELKDYPKLKLTQGRMVFEIRPTIKWDKGKALEFLLESLGFADCTNVLPVYIGDDRTDEDAFKVLRKRGQGIGILVSKYPKDTNASYSLQEPAEVMEFLLRLVEWERLSRARPKW

SEQ ID NO: 336 - DNA, 1128 bp, Oryza sativa
atggcgaaggcgagcgtggtggtgcctgagcaggtgggcgcggcggcggcggcgcaggtggggtgcccctgtccgggcacgacgctgttcccgtacccgccgccgcgcgccgggatcgccgtgcggcgcaagtgcctgcaggcggcgcagcagctggagctcggcgccgggctgcgcggcggctgggtggagtccatgcgggcgtcgtcgcccacccacgccaaggccgccgccgccctcgccgccggcgtcgacgaggagcacgccgcctggatggcgaggcacccgtcggcgctgggcgagttcgagaaggtggtggcggcgtcgaaggggaagcagatcgtcatgttcctcgactacgacggcaccctctcccccatcgtcgacgaccccgacgccgccttcatgagcgagacgatgcggatggccgtgcgcagcgtggcgaagcacttcccgacggcgatcgtgagcgggcggtgccgcgacaaggtgttcgagttcgtgaagctcgccgagctgtactacgcggggagccacggcatggacatcaagggccccgcctcccgccacgccgccgccaagtctcctccccacaacaagggagtcctcttccagccggccagcgagttcctccccatgatcgagcaggtgcaccagcgactcgagcaggccaccagctccatcccgggcgccaaggtcgagaacaacaagttctgcgtctccgtccacttccggtgcgtcgacgagaagagttggggggcgttggcggagacggtgaggagggtggtgagggagttcccgcggctgcggctgagccaggggaggatggtgttcgaggtgcggccgaccatcaagtgggacaagggcaaggccctcgagttcctcctcgactcgctcggtttcgccgactgcagcgacgtgctgccggtctacatcggcgacgaccgcacggacgaggacgcgttcaaggttttgcggcggcgtgggcagggcgtggggatcctggtgtccaagcaccccaaggagacgagcgcctccttctccctccaggagcccgccgaggtgatggagttcttgctgcggctcgtggagtggaatcgcctgtccaggacacggttgaggctgtaa

SEQ ID NO: 337 - protein, 375 aa, Oryza sativa
MAKASVVVPEQVGAAAAAQVGCPCPGTTLFPYPPPRAGIAVRRKCLQAAQQLELGAGLRGGWVESMRASSPTHAKAAAALAAGVDEEHAAWMARHPSALGEFEKVVAASKGKQIVMFLDYDGTLSPIVDDPDAAFMSETMRMAVRSVAKHFPTAIVSGRCRDKVFEFVKLAELYYAGSHGMDIKGPASRHAAAKSPPHNKGVLFQPASEFLPMIEQVHQRLEQATSSIPGAKVENNKFCVSVHFRCVDEKSWGALAETVRRVVREFPRLRLSQGRMVFEVRPTIKWDKGKALEFLLDSLGFADCSDVLPVYIGDDRTDEDAFKVLRRRGQGVGILVSKHPKETSASFSLQEPAEVMEFLLRLVEWNRLSRTRLRL

SEQ ID NO: 338 - DNA, 1014 bp, Physcomitrella patens
atgattacatggattgatgcaatgaggtcgcagtcaccaccacaatttcgctctctacatggagaggctcctgaaactttcgacatcgagacagcagcatacagcgcgtggctcgagaagcacccgtcagctttgagttcgtttgacaaagtggtgaagcttgcgaaatccaagcaaatagttgtatttctcgactacgacggtactctgtcacctattgtcgataatccagaccgggctttaatgtctgatgagatgcgggctacagtaaaggagttggccacttgtttccctactgcaatcatcagtggaagagcgcgtccaaaggtttacgattttgtgcaattgtcggagttgtactatgctggaagtcatggaatggatataatgggtcctgcaaaaagttcaagtggttttaaagtcaacggaactcgagttaaagacaagaagggtaatgatgttgtatttttccaacctgcaagcgaatatcttccaatgatggacaaggtttgcagtgtcttgaatgatacgataagaaccataaaggatgcgcgggtcgaacacaacaagtattgtttgacggttcattttcgtcttgtgaaagaagagctttgggaaactcttgcaacaaaagttcaaaatgttttgaaggattacccaatgttgagtctcacgcatggccggaaggtcttggaggtccgcccatccattgcatgggacaaaggcaaagctgtaaactatcttctaaattctttgggttttgctgattcaagtgacgtcctacctgtatatattggagatgatcgtacagacgaggatgctttcaagttattgaatggtatgaagcatggttgcagcatattggtgtcatccattcccaagtcaactaaggccgccctttcgcttcgggaaccttcagaggtaatggaatttctgcgacgccttgtgcagtggaaaaaacgtggatcagagaaacggaatggcgtccaaaatggtcgttacttcatcaactaa

SEQ ID NO: 339 - protein, 337 aa, Physcomitrella patens
MITWIDAMRSQSPPQFRSLHGEAPETFDIETAAYSAWLEKHPSALSSFDKVVKLAKSKQIVVFLDYDGTLSPIVDNPDRALMSDEMRATVKELATCFPTAIISGRARPKVYDFVQLSELYYAGSHGMDIMGPAKSSSGFKVNGTRVKDKKGNDVVFFQPASEYLPMMDKVCSVLNDTIRTIKDARVEHNKYCLTVHFRLVKEELWETLATKVQNVLKDYPMLSLTHGRKVLEVRPSIAWDKGKAVNYLLNSLGFADSSDVLPVYIGDDRTDEDAFKLLNGMKHGCSILVSSIPKSTKAALSLREPSEVMEFLRRLVQWKKRGSEKRNGVQNGRYFIN

SEQ ID NO: 340 - DNA, 975 bp, Populus tremuloides
atgttcgcaaagaagactgaaactggaggcaaaaccaattcctgggctgattctatgagagattcttcacctacccgtgtcaaatccactacgtctttatcagaaatcgaggagaaaaatacttggattgtaaatcatccttctgctttgaacatgttcgagcaaatagtgaatggctcaaagggaaaacagattgtaatgtttttagattatgatggtacactgtcacccattgttgaagatcctgacagggcattcatgaccaacgagatgagagaagctgttagggacgtcgctagatactttcccactgctatagtgacgggaaggtgtagggataaggtgtacagcttcgtaagattggcagggctttattacgctggtagccatggcatggacatcaagggaccatccaagaattgttgcagaaacaaaaaagattatcaaggtgtactttttcaacctgccagtgattttttacccatgattgatgaggtgtacaatgctttgctggagagaacaaagtatatcccaggggctagagtagaagacaacaaattttgcatatccgtacactttcgttgtgtcgaggaaaagatgtgggctgcattagtagagcaagtaagatcagttctcaatggttatccaaaacttcgattaactcaagggaggaaggttttagagatccgacccaccattaaatgggacaagggcaaagctcttgagttcgtgttggaatcattaggatatgccaattctactgatgttttaccagtttatattggagatgatcgaactgatgaggatgcattcaaggttctaagaaacaggggacaagggcttgggattcttgtttctaaagttcccaaggaaacaaatgcctcgtattctctacaagagccaacagaggcaaactttttacggcgtttggttgagtggaagcgatcaacgttacaaggacaaagcagagtgtaa

SEQ ID NO: 341 - protein, 324 aa, Populus tremuloides
MFAKKTETGGKTNSWADSMRDSSPTRVKSTTSLSEIEEKNTWIVNHPSALNMFEQIVNGSKGKQIVMFLDYDGTLSPIVEDPDRAFMTNEMREAVRDVARYFPTAIVTGRCRDKVYSFVRLAGLYYAGSHGMDIKGPSKNCCRNKKDYQGVLFQPASDFLPMIDEVYNALLERTKYIPGARVEDNKFCISVHFRCVEEKMWAALVEQVRSVLNGYPKLRLTQGRKVLEIRPTIKWDKGKALEFVLESLGYANSTDVLPVYIGDDRTDEDAFKVLRNRGQGLGILVSKVPKETNASYSLQEPTEANFLRRLVEWKRSTLQGQSRV

SEQ ID NO: 342 - DNA, 1122 bp, Populus trichocarpa
atgacaaaccaaaatgtggtagtggctgatacaaactctggaatcaacttggcaatcacagtgcatgtaacaaattcctctatcttcaccacggccgcgcagaagcctccggcggctcctggtggttacatctctatttccagaaagaaacttttaaagaatcttgaaatcagtggaggagcaagatttaatgcttgggttaattccatgagaacctcttctcctactcatgtcaagtccacaccttctgctaatgacgaccaaagctcatggattcttcaccacccatcagcactggagatgtttgagcagataattgatgcctccaaaggaaagcaaatagttatgttcttggactatgatggcacactttctcctatcgttgatgacccagatagagctttcatgtccaagaagatgagagcaacagtgagaaagcttgcgagattttttcctactgcaatagtgagtgggagatgcagagacaaggtgtataactttgtacggttagcagaactgtactatgctggaagccatggcatggacatcaaaggaccagccaaaggcagcaaatacaagaaaggcagtgaaggtgttgtttttcaagctggcagtgagtttcttccaatgatagatgaggtttacaaagaactggtagagaaaactaaaacaactccaggggccaaggtggaaaataacaaattctgtctctctgtgcactatcgctgcgttgatgagaagaaatggagtggactggctcaagtagttaagtcagtgttgaaggagtacccaaagcttcgacttactcaaggaagaaaggttttagaaatccgccctaccattaaatgggacaaaggaaaggctcttgaatttttgttagagtctcttggattcgccaattgtactgatgtttttcctgtttacattggagatgatagaacagacgaggatgcatttaaggtgctgagagagagaggacaaggttttggtatcttggtctctaaattccccaaggacactagtgcatcttattccctacaagaacccacccaggtcatggattttttgcaacgtttggtgcagtggaaacggctagcctttcaagggcagtcaagggtttaa

SEQ ID NO: 343 - protein, 373 aa, Populus trichocarpa
MTNQNVVVADTNSGINLAITVHVTNSSIFTTAAQKPPAAPGGYISISRKKLLKNLEISGGARFNAWVNSMRTSSPTHVKSTPSANDDQSSWILHHPSALEMFEQIIDASKGKQIVMFLDYDGTLSPIVDDPDRAFMSKKMRATVRKLARFFPTAIVSGRCRDKVYNFVRLAELYYAGSHGMDIKGPAKGSKYKKGSEGVVFQAGSEFLPMIDEVYKELVEKTKTTPGAKVENNKFCLSVHYRCVDEKKWSGLAQVVKSVLKEYPKLRLTQGRKVLEIRPTIKWDKGKALEFLLESLGFANCTDVFPVYIGDDRTDEDAFKVLRERGQGFGILVSKFPKDTSASYSLQEPTQVMDFLQRLVQWKRLAFQGQSRV

SEQ ID NO: 344 - DNA, 867 bp, Triticum aestivum
atgtcccccgccggcgccgaccacgaggagtggatcgagaagcacccgtcagcattggagtggttcgagggcgtgctcgcggcggctgaggggaagcagatcgtcatgttcctcgactacgacggcaccctttcgccgatcgtcgaggaccccgaccgcgccgtcatgaccgaggagatgagggaggcggtgaggggcgtcgcccagcatttcccgaccgccatcgtgagtgggagatgcagagacaaggtgttcaactttgtgaaactggaggagctgtactacgccgggagccacggcatggacatcaagggccccaccaaagtgtccaaccacaaggcaaaggctgacgaggttctgtgccagccggcgaccgagttcttgcctgtcattcaggaggtgtatgagacgctgacggcgaagatggagtccatcccgggggccatggtggagaacaacaagttctgcctctcggtgcacttccgctgcgtcgaggaggcggagtgggacgttctgggcagggaggtgagggcggtgctgcacgactacccgaaactctgcctcaccaaggggagaaaggttctcgagatccggccctccatcgagtgggacaagggatacgccctcaagttcttgctcaagtctctcggctatgcggggcgcggcgacgttttcccgatatacatcggggatgaccgcacggacgaggatgcattcaaggtgctgcgcaacatgggacaaggcatcgggatcctcgtgaccaagtttccaaaggacacaagcgcgtcctactctctgcgtgagcctgctgaggtaaaggagttcctgcgcaagctggtgaagagcaacgggacaaagaaggggtaa

SEQ ID NO: 345 - protein, 288 aa, Triticum aestivum
MSPAGADHEEWIEKHPSALEWFEGVLAAAEGKQIVMFLDYDGTLSPIVEDPDRAVMTEEMREAVRGVAQHFPTAIVSGRCRDKVFNFVKLEELYYAGSHGMDIKGPTKVSNHKAKADEVLCQPATEFLPVIQEVYETLTAKMESIPGAMVENNKFCLSVHFRCVEEAEWDVLGREVRAVLHDYPKLCLTKGRKVLEIRPSIEWDKGYALKFLLKSLGYAGRGDVFPIYIGDDRTDEDAFKVLRNMGQGIGILVTKFPKDTSASYSLREPAEVKEFLRKLVKSNGTKKG

SEQ ID NO: 346 - DNA, 1101 bp, Zea mays
gacagatcgatatatcggatccccagcagttacacttacacagggacccccctccctgccttcttccaagacaaggccgatcgatcgatcgagcagctagctattctccatcgcacacgcactgcactgcacggccatgcatgtagaccaatgcatgcatgcgcgcagcagctaggttgttgttgttgttgctaggtagagatcgactactatctatgcataggtaggagcaaaaagaaaacaacaaaaaaaggccagttgtagctaataagcgcctctttgctgttgtgctcgtccatccatcgtccacgccatgcctagcttagctacatgcatgcatgcacgaggtcgtcttcattattcatggttggcgcgcccccttgttattggccagcttgcggaggaactccttgacctcggcagggtcactgagcgagtaggatgccgccgtctccttaggaagcttggacaccaggattccgatgccctgccccatgttgcggagcaccttgaaagcgtcctcgtcagtgcgatcatctccgatgtaaatcgggaagacgtcgttgcgcccagcatagccaagagacttgagcaagaactcgagggccttgcccttgtcccacttgatggacggacgaatctccagcacctttctgccgtgagtgagcttgaggttcgggtactccctgagcaccgacctgacctcctcgttcacggcattccattcctcctcccggacgcagcggaagtggacggacaggcagtacttgttgtgctccaccctggcgccggcgatggactccatcttggccgtcagcgtgcggaacacctcttcgatgaccggcaggaactcactcgcagcttggtaatggacagctgcggcttcagcctgcgtgtgtacgacctgctggacgtggttgggctgcctgcaggcggcggggccctggatgtccatgccatggctcccggcgtagtacagctccgtcagcttcacgaagttgagcaccttgtccctgcatcttccgctcacaatcgcggtggggaagtgctcggcgacgcgccgcacggcttctctcatctcctccgacatgacggcgcggt

SEQ ID NO: 347 - protein, 366 aa, Zea mays
MTKHAAYSSEDVVAAVAAPAPAGRHFTSFQALKGAPLDCKKHAAVDLSASGAAVVGGGPWFESMKASSPRRAADAEHGDWMEKHPSALAQFEPLLAAAKGKQIVMFLDYDGTLSPIVEDPDRAVMSEEMREAVRRVAEHFPTAIVSGRCRDKVLNFVKLTELYYAGSHGMDIQGPAACRQPNHVQQVVHTQAEAAAVHYQAASEFLPVIEEVFRTLTAKMESIAGARVEHNKYCLSVHFRCVREEEWNAVNEEVRSVLREYPNLKLTHGRKVLEIRPSIKWDKGKALEFLLKSLGYAGRNDVFPIYIGDDRTDEDAFKVLRNMGQGIGILVSKLPKETAASYSLSDPAEVKEFLRKLANNKGARQP

SEQ ID NO: 348 - DNA, 1095 bp, Zea mays
ttcagccgaggcaaatggtaaacaacagcaggcatgcatgatgaacaagagagatggaaaccaaaaaaaaaacgaaaatacaaaagggctctactgtactactagctaggtctgttcttgtcccaaagcaagctgctcgatggagatgcagttgcaacaacaaggaagccctctgccggtgcagcaggtaggtagccgaggttgagttagcggcttgacacaggcggatcggagctggtcacggcgggaaagggaaacgaatcgcgggccggatcatcagctgtcgtcgttggcgccgacgagcttgcgcaggaactccttgacctcggcggggtcgcgtagcgtgaaggacgcgctggtgtccttggggaacctggacacgaggatcccggcgccgtgcccgcgcgcgcgcagcaccctgaaggcgtcctcgtcggtgcggtcgtcgccgacgtagatggggaagacgtcgtcgcggtcggcgtcggcggcgaagccgagggcgtggagcaggaactccagcgccttgcccttgtcccagcggatcatggggcggacctccagcaccttgcggccctgggtgaggcgcaggcccgggtggtccctcagcacggcgcggacctgctcgaagagcgcggcccagcacgcctcctccacgcaacggaagtggaccgacaggcagaacttgttgtcctccaccttggcgcccgggatggcgcgctccaccttggccaccagcgccgcgtacacctcctgcatcaccggcaggaactcgctcgccggctggcagagcaccgcctccgcctccgcctccgccttgccgttgccgtggtggtggttggcgtcggcggtgggcccccggatgtccatcccgtggctcccggcgtagtagagctccgctagccgcacgaagctgaacaccttgtcccggcaccgcccgctgacgatcgctgtcgggaagcgcgccgccacgccgcgcaccgcgtccctcatctcgtccgtcatgacggcgcggtcggggtcctccacgatcggggacagcgtgccgtcgtagtccaggaacaccgcgacctgcttccccttggccgccgccgc

SEQ ID NO: 349 - protein, 364 aa, Zea mays
MTKHGVVIGPEDVAAARHFSFPPPRTAAGGESCRKLAAQVDLGPAVVGSWLDSMKASSPRHRLMAPVPGAADAEHDDWMERHPSALDRFDALAAAAKGKQVAVFLDYDGTLSPIVEDPDRAVMTDEMRDAVRGVAARFPTAIVSGRCRDKVFSFVRLAELYYAGSHGMDIRGPTADANHHHGNGKAEAEAEAVLCQPASEFLPVMQEVYAALVAKVERAIPGAKVEDNKFCLSVHFRCVEEACWAALFEQVRAVLRDHPGLRLTQGRKVLEVRPMIRWDKGKALEFLLHALGFAADADRDDVFPIYVGDDRTDEDAFRVLRARGHGAGILVSRFPKDTSASFTLRDPAEVKEFLRKLVGANDDS

SEQ ID NO: 350 - DNA, 1083 bp, Zea mays
atgacgaagcgcaccgccttcgccgcggacgacgcgatcatcgccgccgccgccgccgtcacgtcgcagcccggccggcggttcacgtcgtacccgccggcgagggcgcgcggcggatgcaggctggccccggcggtggcggcggcggcgcgccaggccacggacgaccccggcgccgctgggtcctggccagaactagtcgtgccgcggcacgccgacttcgacgactggatggagaagcacccgtcggcattggccgcgttcgagtcggtgctggccgccgccaaggggaagaagatcgtcatgttcctcgactacgacggcaccctgtcgccgatcgtcaaggaccccgacagcgccgtcatgtcggaggagatgcgggacgcggtgagaggcgtggccgagcacttcccgacggcgatcgtgagcgggaggtgtagagacaaggtgttcaacttcgtgaagctggcggagctgtactacgccgggagccacggcatggacatcaagggacccacggcgcagtccaagcacagcaaggcaaaggccgaagctgttctgtgccaaccagcgagcgcgttcctgcccgtcattgacgaggcgtaccgcgcgctgacggcgaggacggcgccgatccccggcgcgacggtggagaacaacaagttctgcctctccgtccacttccgctgcgtccaggaggagaaatggcgcgctctggaggagcaggtgcggtcggtgctcaaggagtacccggacctccggctcaccaagggcaggaaggtcttggaggtccggccgtccatcaagtgggacaagggcaacgccattcagttcttgctcgagtgtctcggttttgctgacagtaacaatgtcttcccgatatatattggagacgatcgcaccgacgaggacgcgttcaaggtgctgcgcagcatggggcaggggatcggaatcctcgtgagcaagattccaaaggagaccagcgcatcctactccttgcgtgaaccttccgaggtgaaggagttcctgcacaagttggtcaggtccaagcaggcagcagagcagcaggtggtgaaaagctag

SEQ ID NO: 351 - protein, 360 aa, Zea mays
MTKRTAFAADDAIIAAAAAVTSQPGRRFTSYPPARARGGCRLAPAVAAAARQATDDPGAAGSWPELVVPRHADFDDWMEKHPSALAAFESVLAAAKGKKIVMFLDYDGTLSPIVKDPDSAVMSEEMRDAVRGVAEHFPTAIVSGRCRDKVFNFVKLAELYYAGSHGMDIKGPTAQSKHSKAKAEAVLCQPASAFLPVIDEAYRALTARTAPIPGATVENNKFCLSVHFRCVQEEKWRALEEQVRSVLKEYPDLRLTKGRKVLEVRPSIKWDKGNAIQFLLECLGFADSNNVFPIYIGDDRTDEDAFKVLRSMGQGIGILVSKIPKETSASYSLREPSEVKEFLHKLVRSKQAAEQQVVKS

SEQ ID NO: 352 - DNA, 1155 bp, Zea mays
atgccgatggcgaagccgagcgtggcggtggcggaggcttccggcgtcccagcgcaggcgtcgtgctcgtgcccctgcccggggacgacgctgttcccgtacccgccgccgcgcggcgccagcgggatcgcagccgccgccgtgcgccgcaagtgcttgcaggcggaggtgggcggcggcgcctgctggggcgtggagtccatgcgggcgtcgtcgcccacgcacgccagggccgcagccgcgctcgccggcgccggcgccgacgaggaggaggagcgcgccgcctggatggcgcggcacccgtcggcgctgggcaagttcgagaggatcgtggcggcgtccgagggcaggcgcatcgtcatgttcctggactacgacggcacgctgtcgcccatcgtggacgaccccgacgccgccttcatgagcgagacgatgcggatggccgtgcgtagcgtcgccaagcatttcccgacggcgatcgtgagcggccggtgccgcgacaaggtgttcgggttcgtgaagctggcggagctctactacgccggcagccacggcatggacatcaagggtccggccaaggcctcttcttcccggcacgagaaggccaaggcaaaaggagtcctgttccaaccggcaacggcgagcgagttcctgcccatgatagaggctgtgcacgagcgcctggtagagacgacgcgcagcatacccggggccaaggtggagaacaacaggttctgcgtctccgtccacttcagatgcgtcgacgaaaagatgtggggcgagctgtgggagtcggtgaagggcgttctgcgggagtaccccaggctgcggctgacgcaggggcggatggtgctggaggtgcggcccaccatcaagtgggacaagggcaaggcgctcgagttcctgctcgagtcgctcggcttcgcgggctgcaccaacgtcctgcccgtgtacatcggcgacgaccgcaccgacgaggacgccttcagggcgctgcggcgccggggccagggccaaggcgtcggcatcctggtgtccaagcaccccaaggagaccagcgcctcctactcgctccaggagcccgccgaggtgatggagttcttgctgcggctcgtcgagtggaagcgcctctccaggctgagtcggacgcaatga

SEQ ID NO: 353 - protein, 384 aa, Zea mays
MPMAKPSVAVAEASGVPAQASCSCPCPGTTLFPYPPPRGASGIAAAAVRRKCLQAEVGGGACWGVESMRASSPTHARAAAALAGAGADEEEERAAWMARHPSALGKFERIVAASEGRRIVMFLDYDGTLSPIVDDPDAAFMSETMRMAVRSVAKHFPTAIVSGRCRDKVFGFVKLAELYYAGSHGMDIKGPAKASSSRHEKAKAKGVLFQPATASEFLPMIEAVHERLVETTRSIPGAKVENNRFCVSVHFRCVDEKMWGELWESVKGVLREYPRLRLTQGRMVLEVRPTIKWDKGKALEFLLESLGFAGCTNVLPVYIGDDRTDEDAFRALRRRGQGQGVGILVSKHPKETSASYSLQEPAEVMEFLLRLVEWKRLSRLSRTQ

SEQ ID NO: 354 - DNA, 1068 bp, Zea mays
ccgttgcctgctctccttggaccagctgaccaacttgcgcaggaactcctccacctcagaaggttcacgcagggagtaggatgcgcgggtctccttcggaatcttgctcaccaggatcccgatcccttgccccaagttgcgcaggaccttgaacgcgtcctcgtcggtgctatcgtctccgatatatatcgggaagacactgttactgccagcaaaaccgagagactcgagcaagaactgcagggcgttgcccttgtcccacttgatggacggccggatctcgaggaccttcctgcccttggtgaggcggaggtccgggtactccttgagcaccgaccggacctgctcctccagagcgcgccatttctcctcctggacgcagcggaagtggacggagaggcagaacttgttgttctccaccgtcgcgccggggatcggcgccgtgctcgccgtcagcgcgcggtacacctcctcaatgaccggcaggaacgccctcgcaggttggcatagaacggctccggcctttgccttagtgtgcttggactgtgttgtggggcccttgatgtccatgccgtggctcccggcgtagtacagctccgccagcttcacgaagttgaacaccttgtctctacacctcccgctcacgatcgccgtcgggaagtgctcggccacgcctctcaccgcgtcccgcatctcctcggacatgacggcgctgtcggggtccctgacgatcggcgacagggtgccgtcgtagtcgaggaacatgacgatcttcttgcctttggcggcggccagcaccgactcgaacgcggccaatgccgacgggtgcttctccatccagtcgtcgaagtcggcgtgccgcggcacgactagttctggccaggacacagcggcgccgggatcgtccgtggcctggcgcgccgccgccgccggggccagcctgcagccgccgcgcgccctcgccggcgggtacgacgtgaaccgccggccgggctgcgacgtgatggcggcggcggcggcgatgatcgcgtcgtccgcggcgaaggcggtgtgcttcgtcattgcgcg

SEQ ID NO: 355 - protein, 355 aa, Zea mays
MTKHTAFAADDAIIAAAAAITSQPGRRFTSYPPARARGGCRLAPAAAARQATDDPGAAVSWPELVVPRHADFDDWMEKHPSALAAFESVLAAAKGKKIVMFLDYDGTLSPIVRDPDSAVMSEEMRDAVRGVAEHFPTAIVSGRCRDKVFNFVKLAELYYAGSHGMDIKGPTTQSKHTKAKAGAVLCQPARAFLPVIEEVYRALTASTAPIPGATVENNKFCLSVHFRCVQEEKWRALEEQVRSVLKEYPDLRLTKGRKVLEIRPSIKWDKGNALQFLLESLGFAGSNSVFPIYIGDDSTDEDAFKVLRNLGQGIGILVSKIPKETRASYSLREPSEVEEFLRKLVSWSKESRQRD

SEQ ID NO: 356 - protein, 266 aa, Escherichia coli
MTEPLTETPELSAKYAWFFDLDGTLAEIKPHPDQVVVPDNILQGLQLLATASDGALALISGRSMVELDALAKPYRFPLAGVHGAERRDINGKTHIVHLPDAIARDISVQLHTVIAQYPGAELEAKGMAFALHYRRAPQHEDALMTLAQRITQIWPQMALQQGKCVVEIKPRGTSKGEAIAAFMQEAPFIGRTPVFLGDDLTDESGFAVVNRLGGMSVKIGTGATQASWRLAGVPDVWSWLEMITTALQQKRENNRSDDYESFSRSI

SEQ ID NO: 357 - protein, 896 aa, Saccharomyces cerevisiae
MTTTAQDNSPKKRQRIINCVTQLPYKIQLGESNDDWKISATTGNSALFSSLEYLQFDSTEYEQHVVGWTGEITRTERNLFTREAKEKPQDLDDDPLYLTKEQINGLTTTLQDHMKSDKEAKTDTTQTAPVTNNVHPVWLLRKNQSRWRNYAEKVIWPTFHYILNPSNEGEQEKNWWYDYVKFNEAYAQKIGEVYRKGDIIWIHDYYLLLLPQLLRMKFNDESIIIGYFHHAPWPSNEYFRCLPRRKQILDGLVGANRICFQNESFSRHFVSSCKRLLDATAKKSKNSSNSDQYQVSVYGGDVLVDSLPIGVNTTQILKDAFTKDIDSKVLSIKQAYQNKKIIIGRDRLDSVRGVVQKLRAFETFLAMYPEWRDQVVLIQVSSPTANRNSPQTIRLEQQVNELVNSINSEYGNLNFSPVQHYYMRIPKDVYLSLLRVADLCLITSVRDGMNTTALEYVTVKSHMSNFLCYGNPLILSEFSGSSNVLKDAIVVNPWDSVAVAKSINMALKLDKEEKSNLESKLWKEVPTIQDWTNKFLSSLKEQASSNDDMERKMTPALNRPVLLENYKQAKRRLFLFDYDGTLTPIVKDPAAAIPSARLYTILQKLCADPHNQIWIISGRDQKFLNKWLGGKLPQLGLSAEHGCFMKDVSCQDWVNLTEKVDMSWQVRVNEVMEEFTTRTPGSFIERKKVALTWHYRRTVPELGEFHAKELKEKLLSFTDDFDLEVMDGKANIEVRPRFVNKGEIVKRLVWHQHGKPQDMLKGISEKLPKDEMPDFVLCLGDDFTDEDMFRQLNTIETCWKEKYPDQKNQWGNYGFYPVTVGSASKKTVAKAHLTDPQQVLETLGLLVGDVSLFQSAGTVDLDSRGHVKNSESSLKSKLASKAYVMKRSASYTGAKV

SEQ ID NO: 358 - DNA, 1107 bp, Arabidopsis thaliana
atggatttaaactcaaaccacaaatcctctgttcttaaagatccttcaccatcagttaaccaatcaagactcggcgtgtctagtagatttatgatgagtcaatggaagaaacctgcgaaactcgatgatgttagatccaatggttggttagatgcaatgatttcatcttctccaccgcgtaagaagcttgtcaaagattttaatgttgaagttgctcctgaagatgattttgctcaacgtgcttggatggtgaaatatccttcggcgattagctcgtttgcgcatattgcagctcaagcaaagaagaaaaagattgctgtatttctagattatgatggtactctttctccaatagttgatgatcctgatcgtgccatcatgtctgatgcaatgcgttctgcggttaaagatgtcgcgagttacttcccaaccgcaataattagcggtagaagccgtgacaaggtttatcagttggtaggactaacagaactttattacgcgggtagtcatggaatggacataatgacttcttctgatggtccgaattgtttcaaatccactgaccaacagggtaaggaagtgaatctgtttcagcccgcgagagaattcataccggttatcgacgaggtttttagaacccttgttgagaaaatgaaagatatcaaaggtgcaaaagtagagaaccacaagttctgtgcatctgtacattaccgtaacgttgacgaaaaggattggcctattattgctcagcgtgttcatgaccacttgaaacaataccctcgtttgcgtctaactcatgggaggaaggttttagaggttcgtcctgtgatagactggaacaaaggaagagcggtcgagtttctattagaatctctcggattaagcaataaagacgatttgcttcctatctacattggtgatgacacaaccgatgaagatgcgttcaaggtactgagagatgggaaccgaggtttcggcatcctagtatcgtctataccgaaagaaagcaatgcgttttactcccttagagatccatccgaggtgaagaagtttctaaagactttggtgaaatgggcaaagttggagaagaattctactggtttttga

SEQ ID NO: 359 - protein, 368 aa, Arabidopsis thaliana
MDLNSNHKSSVLKDPSPSVNQSRLGVSSRFMMSQWKKPAKLDDVRSNGWLDAMISSSPPRKKLVKDFNVEVAPEDDFAQRAWMVKYPSAISSFAHIAAQAKKKKIAVFLDYDGTLSPIVDDPDRAIMSDAMRSAVKDVASYFPTAIISGRSRDKVYQLVGLTELYYAGSHGMDIMTSSDGPNCFKSTDQQGKEVNLFQPAREFIPVIDEVFRTLVEKMKDIKGAKVENHKFCASVHYRNVDEKDWPIIAQRVHDHLKQYPRLRLTHGRKVLEVRPVIDWNKGRAVEFLLESLGLSNKDDLLPIYIGDDTTDEDAFKVLRDGNRGFGILVSSIPKESNAFYSLRDPSEVKKFLKTLVKWAKLEKNSTGF

SEQ ID NO: 360 - DNA, 1134 bp, Arabidopsis thaliana
atggatttgaatataaacaagacgacccctgttcttagtgaccctactacaccagtaagtaaaacaagacttggatcatccttcccttcagggagattcatgatgaattctagaaagaagattcctaaactcgatgatgttcgatctaacggttggttggacgcgatgatatcttcgtctccaccgcgtaaaaggcttgtcaaggatttcaatattgagattgctcctgaagatgatttttctcaacgggcctggatgctcaagtatccttcagcgattacctcgtttgcgcatattgcagctcaagcaaagaacaagaagatagctgtgtttctagattatgatggaacactttctccaatagtcgatgaccctgatcgcgccatcatgtctgatgcgatgcgtgctgctgtgaaagatgtcgccaagtacttcccaacagcaataattagtggtagaagccgtgacaaggtttaccaattggtagggctaaccgaactctattacgcgggtagtcacgggatggacattatgactcctgtaaatccaaatggatcccctgaagaccctaattgtataaaaaccactgaccaacagggtgaggaggtaaacctctttcagcctgctaaagagttcatacccgtcattgaagaggtttataataacctcgttgagataactaaatgtatcaaaggtgcaaaagtagagaaccataagttttgtacttctgtacattaccgtaatgttgacgagaaggactggccacttgttgctcaacgcgttcatgaccacctgaaacgataccctcgtttgcgtataactcacggtagaaaggttttagaggtgcgtcctgtgattgagtggaacaaaggaaaagcagtagagtttctgttagagtctctcggattaagcaacaacgatgagttcctcccaatcttcatcggagatgacaagaccgatgaagatgcattcaaggtactgagggaagggaacagaggatttggaatattggtatcgtctgtaccaaaagaaagcaatgcattttactctcttagagacccttccgaggtgaagaagtttctcaagactttggtgaaatgggggaagatggaaagttcaaaaacaagtttttga

SEQ ID NO: 361 - protein, 377 aa, Arabidopsis thaliana
MDLNINKTTPVLSDPTTPVSKTRLGSSFPSGRFMMNSRKKIPKLDDVRSNGWLDAMISSSPPRKRLVKDFNIEIAPEDDFSQRAWMLKYPSAITSFAHIAAQAKNKKIAVFLDYDGTLSPIVDDPDRAIMSDAMRAAVKDVAKYFPTAIISGRSRDKVYQLVGLTELYYAGSHGMDIMTPVNPNGSPEDPNCIKTTDQQGEEVNLFQPAKEFIPVIEEVYNNLVEITKCIKGAKVENHKFCTSVHYRNVDEKDWPLVAQRVHDHLKRYPRLRITHGRKVLEVRPVIEWNKGKAVEFLLESLGLSNNDEFLPIFIGDDKTDEDAFKVLREGNRGFGILVSSVPKESNAFYSLRDPSEVKKFLKTLVKWGKMESSKTSF

SEQ ID NO: 362 - DNA, 1158 bp, Arabidopsis thaliana
atggacatgaaatctggtcactcgtctcctgtaatgactgattctccaccaataagcaactcaagattaaccattcgtcagaatagacttccttactcatcagcagcagccacggctatctcacagaacaacaatctcttactaaccgttccaagaaagaaaactgggatccttgatgatgttaagtctaatggttggcttgatgcgatgaaatcttcttctcctcctcctacaatacttaacaaagataacttaagcaatgatgctacggatatgacttatcgcgaatggatgcagctcaagtatccatcagctcttacctcttttgagaaaatcatgagttttgcaaaaggcaaaagaatagcattgtttcttgattatgacgggacactttcgcctattgttgaggaacctgattgtgcatacatgtcaagtgctatgcgtagtgcagtgcaaaatgttgccaagtatttccctaccgcgatcattagtggaagaagccgggataaggtgtatgagtttgttaatttgagtgaactttattacgccggaagccatggaatggacatcatgagtcccgcaggagaatctttaaaccatgaacatagccgtactgtatcagtttacgaacaggggaaagatgtaaatctattccagcctgctagcgagtttctcccgatgatcgataaggtgctttgttctcttatagagagtacaaaagatatcaaaggggtaaaagtagaagacaacaagttctgcatctctgtgcattaccgcaatgtagaagaaaagaactggacattggttgcacagtgtgtagatgatgtcatcagaacatatccaaaactacggctaacacatggccggaaggttttagagatccgtcctgtgattgactgggacaaagggaaagctgtgacatttctacttgaatcactcggcctaaacaactgtgaggatgttcttccaatctatgttggggatgatcgaacagacgaagatgcatttaaggtactacgagatggaccaaaccacggttatggtatattagtctctgctgtgcctaaagacagcaatgccttttactcgcttcgtgacccgtctgaggtgatggagtttctgaagtcattggtgacatggaagagatcaatgggttaa

SEQ ID NO: 363 - protein, 385 aa, Arabidopsis thaliana
MDMKSGHSSPVMTDSPPISNSRLTIRQNRLPYSSAAATAISQNNNLLLTVPRKKTGILDDVKSNGWLDAMKSSSPPPTILNKDNLSNDATDMTYREWMQLKYPSALTSFEKIMSFAKGKRIALFLDYDGTLSPIVEEPDCAYMSSAMRSAVQNVAKYFPTAIISGRSRDKVYEFVNLSELYYAGSHGMDIMSPAGESLNHEHSRTVSVYEQGKDVNLFQPASEFLPMIDKVLCSLIESTKDIKGVKVEDNKFCISVHYRNVEEKNWTLVAQCVDDVIRTYPKLRLTHGRKVLEIRPVIDWDKGKAVTFLLESLGLNNCEDVLPIYVGDDRTDEDAFKVLRDGPNHGYGILVSAVPKDSNAFYSLRDPSEVMEFLKSLVTWKRSMG

SEQ ID NO: 364 - DNA, 1170 bp, Glycine max
atggacttgaagtcgaatcatactcctgttctcactgatgctgcacctgtaacaaagtctagactgggtgtgcattccagtttgttgccttactcccatactgggacaacctttacacatggaatgttattgactatcccgaggaagaagacaggaattcttgaagatgttcgttgtagtggttggttggatgccatgaaatcatcttcacctccagccaggaagataacaaaggatgttggtcttgggtttgcatcatctgattctgatactgctggtgctttatttagctggctgctaaaatacccatccgcacttgcatcttttgatcaaatcatgaactatgcaaaagggaaaagaattgcgttgtttatggattatgatggaactctttcaccgattgtggataatcctgactgtgctttcatgtccgacaatatgcgtgctgctgttaagaaggtggcagaatattttccaacggcaataattagtggaagaagtcgtgataaggtatatcaatttgtaggactaacagaactttattacgctggtagtcatggaatggacatcattggccctgttagacaatctgtatctgataatcacctaaattgcattaggtctacagacaagcagggtaaggaagtaaatttattccaacctgctgctgaatttctgcccatgattaatgaggtacttaattctcttgaagagtgtacaaaagacattaaaggagctaaagttgagaacaataaattttgtgtatctgtgcactaccggaatgtagatgaaaagtattggaattgggtggggcaacgtgttcatgatgttctgaagggctatccacgtttgcgcttaactcatgggcggaaggttttagagatccgacctgtgattaactgggataagggcaaagctgtcacgtttctacttgagtcacttgggctaaacaattgtgatgatgtgcttcctatatatattggagatgatcggacagacgaagatgcatttaaggttttgagagagggaaataaaggttatgggatcttggtgtcttcagcaccaaaagaaagcaacgcaatttactctcttcgtgatccatcagaggtcatggaatttctcaagtcacttgtgttgtggaaatcaagcaccttaaaaagccttatatag

SEQ ID NO: 365 - protein, 389 aa, Glycine max
MDLKSNHTPVLTDAAPVTKSRLGVHSSLLPYSHTGTTFTHGMLLTIPRKKTGILEDVRCSGWLDAMKSSSPPARKITKDVGLGFASSDSDTAGALFSWLLKYPSALASFDQIMNYAKGKRIALFMDYDGTLSPIVDNPDCAFMSDNMRAAVKKVAEYFPTAIISGRSRDKVYQFVGLTELYYAGSHGMDIIGPVRQSVSDNHLNCIRSTDKQGKEVNLFQPAAEFLPMINEVLNSLEECTKDIKGAKVENNKFCVSVHYRNVDEKYWNWVGQRVHDVLKGYPRLRLTHGRKVLEIRPVINWDKGKAVTFLLESLGLNNCDDVLPIYIGDDRTDEDAFKVLREGNKGYGILVSSAPKESNAIYSLRDPSEVMEFLKSLVLWKSSTLKSLI

SEQ ID NO: 366 - DNA, 1116 bp, Oryza sativa
atggatttgagcaatagctcacctgtcatcaccgatccggtggcgatcagccagcagttgttgggcggcctgccttcaaatctgatgcagttttcagtcatgcccggtggctactccagctctggcatgaacgttggtgtcagtaggctcaaaatcgaggaagtccttgtcaatggactgcttgatgccatgaaatcctcgtcacctcgcaggaggctgaatgtagcatttggcgaggacaattcatctgaagaagaagaccctgcttacagcgcttggatggcaaaatgtccttctgctttggcttccttcaagcaaattgtagccagtgcacaagggaagaagattgctgtgtttctagactatgacggcacactgtcgcctattgtggatgatcctgacaaagcagtgatgtctcccgtgatgagagctgctgtgagaaatgttgcgaagtacttccccactgcaattgtcagcggaaggtcccgcaataaggtgtttgaatttgtaaaactgaaggagctttattatgctggaagccatggtatggacataatggcaccttcagcaaatcatgagcacagtgctgaaaagagcaaacaggccaatctcttccaacctgcacacgactttctgccaatgatcgatgaggttaccaagtccctcttgcaagttgtcagtggaattgaaggtgcaactgttgagaacaacaaattctgcgtttctgtacattatcgcaacgttgcagagaaggattggaaactggtcgcacggctcgtaaacgaagtgctggaggcttttcctcgtctcaaagtaaccaatggacgaatggttttagaggttcgtccggtgatcgactgggacaagggaaaggctgtggagtttctgctccagtcactcgggctaaatgactctgaaaatgtgatccccatctacattggagacgacagaactgacgaagacgctttcaaggtacttcgacagcgaaattgcggttatggaatactagtttcacaggttcccaaggaaactgaagccttctactcgctgagagatccatctgaagtgatggagttcctcaatttcttggtgagatggaagaagcactcagtgtga

SEQ ID NO: 367 - protein, 371 aa, Oryza sativa
MDLSNSSPVITDPVAISQQLLGGLPSNLMQFSVMPGGYSSSGMNVGVSRLKIEEVLVNGLLDAMKSSSPRRRLNVAFGEDNSSEEEDPAYSAWMAKCPSALASFKQIVASAQGKKIAVFLDYDGTLSPIVDDPDKAVMSPVMRAAVRNVAKYFPTAIVSGRSRNKVFEFVKLKELYYAGSHGMDIMAPSANHEHSAEKSKQANLFQPAHDFLPMIDEVTKSLLQVVSGIEGATVENNKFCVSVHYRNVAEKDWKLVARLVNEVLEAFPRLKVTNGRMVLEVRPVIDWDKGKAVEFLLQSLGLNDSENVIPIYIGDDRTDEDAFKVLRQRNCGYGILVSQVPKETEAFYSLRDPSEVMEFLNFLVRWKKHSV

SEQ ID NO: 368 - DNA, 1050 bp, Oryza sativa
atgaagatctctgctaactttctgttgaacaactgtgcacgcacctacaccaagaagaaaacactcaagaagtgtaagcgtgaacttgttgaagtcgttgatggacttgtcggggtaatgatgacatcatcgaaccgtgaaaagccagacattgaatctggttacgacggttcgtctgatgaagattccactgagaattctcgtgcagaaatttgtccttctgccttatgtttcttcgaccaaatcgtagctagtgcgcaagacaagaaggttgtgttgtttctagactatgatggcacactttctcctattgtgaatgatccagagaaagcattcatgtcctctgagatgcgtgctactgtgaaaagtgttgcaaagcacttccctacagcaatagttagtgggagatcccgcgacaaggtgtttgattttgtcaagctgactgagatatactatgcagggagtcatggtatggacatactagcatcttttgcagattcagacagtaccatagaaaagaccaaagaaaccaagctttttcaacctgcaaatgagtttctgactatgataactgaggtttccaaatccctgatagaggtcactaaagcgattaagggtgcaacagttgagaacaacaagttttgcgtatctgttcattatcgtaatgtcgacaagaagaactggaagttggtcgcacaggttgtcaacaatgttctaaaagattttcctagtcttaaagtatccactggacggaaggttttagaggttcgtccaatgatcaactgggacaagggaaaagccgtcgagtttttgcttcgatcgcttgagctagatgattctgaaactgttcttcctatctatattggggatgataaaacggatgaagatgcattcaaggtgcttcgcgagcgaaagaatggatgtgggattcttgtttcgcaggtgcccaagaagtctgaagcctttttcatgctgagaggcccatcagaagtagtgatccttcctgtcatgcttaacttttttgctgcccttctgattatgcctagttaa

SEQ ID NO: 369 - protein, 349 aa, Oryza sativa
MKISANFLLNNCARTYTKKKTLKKCKRELVEVVDGLVGVMMTSSNREKPDIESGYDGSSDEDSTENSRAEICPSALCFFDQIVASAQDKKVVLFLDYDGTLSPIVNDPEKAFMSSEMRATVKSVAKHFPTAIVSGRSRDKVFDFVKLTEIYYAGSHGMDILASFADSDSTIEKTKETKLFQPANEFLTMITEVSKSLIEVTKAIKGATVENNKFCVSVHYRNVDKKNWKLVAQVVNNVLKDFPSLKVSTGRKVLEVRPMINWDKGKAVEFLLRSLELDDSETVLPIYIGDDKTDEDAFKVLRERKNGCGILVSQVPKKSEAFFMLRGPSEVVILPVMLNFFAALLIMPS

SEQ ID NO: 370 - DNA, 1080 bp, Oryza sativa
atgggttcctgcggtaacggtagaagctctgaatatgatgatcctgcatcattagagaagatggaggaactggttttacctctgaaattgatgcccttacacaccaatggccggttgtatgacatgaggttgtcctcacctactgctacctgtgtgatcaatagttcatctggttcattcgacccgatctaccgagcttggacgaagaagtatccttcagctctaaatgcctttgaccacattgttgcctatggcaaagggaagaagatagcgctgtttttggactacgacggtacactgtcgccaattgtcgatgaacctgacaatgctatcatgtctgaccagatgcgcgaggtggtgaggaatgctgccttgcatctacccactgcgattatcagtggaaggtctcgtgataaggtgtttgattttgttaaactaacagaattgtactatgctggtagccatggaatggacatcatgggtccagttggggaacatgattcagttactaaccataggagctccattaactcaaatagaaagcagggcaagggagtgaagatcttccaggctggtactgaattcttaccaatgatcaatgaggtttttagattgctcatcgataagacaaaggcaatcgacggtgtgaaaattgagaacaacaagttctgtgtatcggtgcactaccgcaatgttgaggagaagaattggcaacttgtttctcaatgcacaaatgatgtcctaaaagtctaccctcgcctccgattgactcatggacgaaaagttttggaaattcgtccagtgatagactggaacaaggggaaggctgtggagttcttgctggactccctagatctagctagctgtaaaaatgttctccctatttacatcggggatgattgtaccgacgaggatgcttttaaggttcttcgtgacgataaaaggggtttcgggattctggtgtcatctgtaccaaaggattctcatgccctatattctctgattgatccatctgaggttatggaattcttgaaaagactagtgatgtggaagaacgaagaagcatcacataataagtag

SEQ ID NO: 371 - protein, 359 aa, Oryza sativa
MGSCGNGRSSEYDDPASLEKMEELVLPLKLMPLHTNGRLYDMRLSSPTATCVINSSSGSFDPIYRAWTKKYPSALNAFDHIVAYGKGKKIALFLDYDGTLSPIVDEPDNAIMSDQMREVVRNAALHLPTAIISGRSRDKVFDFVKLTELYYAGSHGMDIMGPVGEHDSVTNHRSSINSNRKQGKGVKIFQAGTEFLPMINEVFRLLIDKTKAIDGVKIENNKFCVSVHYRNVEEKNWQLVSQCTNDVLKVYPRLRLTHGRKVLEIRPVIDWNKGKAVEFLLDSLDLASCKNVLPIYIGDDCTDEDAFKVLRDDKRGFGILVSSVPKDSHALYSLIDPSEVMEFLKRLVMWKNEEASHNK

SEQ ID NO: 372 - DNA, 1149 bp, Oryza sativa
atggatttgaagacaagcaactctcctgttattgctgatcctctccctaaattagccttgccatctgctgtgatgacgtacactacacctacgagtttcccctctaccgggctgtacttgaacactccgaaaaagaagcctctgcctggaaagatcgaagaagtccgcgccgctggatggcttgatctcatgctggcctcctcgccacctcgcaagaggcagactaaggactttgccaatgatgttcaagctgacgagcttgatttgctataccgtaattgggtggtgaaccatccatctgctttaacatcatttgaggatattgttaatcttgccagaggtaaaagattggcactgttccttgattatgatggaactctttcaccgattgtggacaatcctgaaaatgcagtaatgtctgacgagatgcgctctgctgtgaagcatgtggcatcactttttcccactgcgatcattagtggaagatctcgtgataaggtttttgactttgtgaaactaactgaactgtattacgctggaagtcatggaatggatatcatggggcctgttaggaagtctgattcgagtggtcagcatgtggaatgtatcaggtccactgattcagagggtaaagaggtcaacctcttccaacctgcaagtgagtttttacctatgattagcgaggtgtacaaaaagctcagtgaaagtattaaggacattgatggtgcaaggatggaagataacaaattctgtgtgtccgttcattaccgcaatgtagcaccacatgactacggagaagttcatcaacgtgtgactgccgtcctgaagaattacccttgtctaaggcttacccatgggagaaaggttcttgaggttcgacctgtgatagactggaacaaggggaaagctgtggaatttttgctggagtcacttggactatgtgggaaagaagatgttcttcctatctatgttggagatgacaagactgatgaggatgcattcaaggttctgaaggcaaacagcattggctttggaattttggtgtcatctgtgcccaaggatactgatgctttctattccgtacgggacccagctgaggtgatggaattcctgaagaaactggcatcttggaaggaggaatccacttaa

SEQ ID NO: 373 - protein, 382 aa, Oryza sativa
MDLKTSNSPVIADPLPKLALPSAVMTYTTPTSFPSTGLYLNTPKKKPLPGKIEEVRAAGWLDLMLASSPPRKRQTKDFANDVQADELDLLYRNWVVNHPSALTSFEDIVNLARGKRLALFLDYDGTLSPIVDNPENAVMSDEMRSAVKHVASLFPTAIISGRSRDKVFDFVKLTELYYAGSHGMDIMGPVRKSDSSGQHVECIRSTDSEGKEVNLFQPASEFLPMISEVYKKLSESIKDIDGARMEDNKFCVSVHYRNVAPHDYGEVHQRVTAVLKNYPCLRLTHGRKVLEVRPVIDWNKGKAVEFLLESLGLCGKEDVLPIYVGDDKTDEDAFKVLKANSIGFGILVSSVPKDTDAFYSVRDPAEVMEFLKKLASWKEEST

SEQ ID NO: 374 - DNA, 1164 bp, Populus tremuloides
atggacctcaaatcaaatcataatgctcctgtgctcactgattctgctcccctaagcaagtcaaggctacgcgggtaccaccatggtttgatgctgccgtactcaccctcaggtgcacctttctcgtcaaatctattactatctattcctaggaggaaaactggagtgcttgatgatgttcgctcctgtggttggctggatgccatgaaatcatcatctcctactcataagaagtttgccaaggatattaaccatgagctttccgcacctgatccagaagttgcctatcgcacctggctgcttaaatatccatctgcgcttgcatctttcgagcaaattgcaaactttgcaaaaggcaagagaatcgccttatttctggattatgatggtactctttcaccaattgttgaaaatcctgacaatgccttcatgtctgctgatatgcgttccattgtaaaggaagtggcaaaatatttcccaacagcaataatcagtggaagaagccgtgacaaggtgtatgagtttgtagggcttacagaactctactatgcgggtagtcatggtatggatatcatgggccctgtcaggcaatctgtatctgacgaccaccgaaattgtatcaagtctacggacaagcagggcaacgaagttaacttattccagcctgcaagagaatttttacctatgattgacgaggtttatagttcccttgtcaggattaccgaagatattaaaggggcaacagttgagaacaataaattctgtgtctctgtacattaccgtaacgttgatcaagataactggaaatcagttggggagcgtgtccaggatgtcataaagaagtatcctcgcctgcgattgactcatgggaggaaggttttagaaatccgtcccgcgatcaattgggacaaggggaaagctcttgaatttctacttgaatcactagatctcagcaattgtgatgatgtgctgccgatttatgttggagatgaccggacagatgaagatgcatttaaggttttgagagagaggaactgtggttatggcatttttgtatcaaaatcaccgaaggaaagcaatgcgtattactctctcagagacccagcagaggtcatggagtttctcaagtccctggtgacatggaagaaatcgagtgctttataa

SEQ ID NO: 375 - protein, 387 aa, Populus tremuloides
MDLKSNHNAPVLTDSAPLSKSRLRGYHHGLMLPYSPSGAPFSSNLLLSIPRRKTGVLDDVRSCGWLDAMKSSSPTHKKFAKDINHELSAPDPEVAYRTWLLKYPSALASFEQIANFAKGKRIALFLDYDGTLSPIVENPDNAFMSADMRSIVKEVAKYFPTAIISGRSRDKVYEFVGLTELYYAGSHGMDIMGPVRQSVSDDHRNCIKSTDKQGNEVNLFQPAREFLPMIDEVYSSLVRITEDIKGATVENNKFCVSVHYRNVDQDNWKSVGERVQDVIKKYPRLRLTHGRKVLEIRPAINWDKGKALEFLLESLDLSNCDDVLPIYVGDDRTDEDAFKVLRERNCGYGIFVSKSPKESNAYYSLRDPAEVMEFLKSLVTWKKSSAL

SEQ ID NO: 376 - DNA, 1077 bp, Populus tremuloides
atggatatcgagtcaaaccattcttctcctgttctcactgatcctgctccaataaacaagtcaaggctcggcatccattctaatttaaaaaagcctgggaaacttgatgaagtctgctcgaacgcatgtctggatgccatgaaatcctcatcaccccctcgcaagaagctcattaaggatggtgctgacacagcttacggcacctggatgctcaagcatccatcagcactcaactcatttgaggaaattgcaaattttgccaaaaacaaaaagatagcaatgtttctagactacgatggtactctctctccaatagtagatgacccagataatgcccttatgtctgatgatatgcgttttgcagtaagaaacttcgcaaaatatttcccaacggcgattattagtggaagaagtcgtgacaaggtttatcagcttgtaggactaacagaattgtattatgctggtagtcatgggatggacatcttgggccctgtacgaaaagcggtgtccaatgaccatccaaactgtaatgaatcaactactgaccaacagggcaaggaggtgaatctgtttcagcctgctagagaatttatacctctgatcgatgaggtttttagaacccttgtcgaggatactaaggggatcaaaggtgcaaaagttgagaatcataaattttgcgtctctgtacatttccgtaatgtagatgagaagaactggcaatctattgcacaatgtgttcaggatattttagataagtatcctcgtttgcgaaaaactcatggacggaaggttttagaggtccgtccaatgattgactggaataaaggaaaagcagttgaatttttgcttgaatctctaggtctaagtaatagagatgatgtactcccaatttatattggtgatgatctgacagatgaagatgcattcaaggtgctccgggaggggaatcgaggctgtggaattttggtgtcatctagacccaaagaaaccaatgcagtttactctctcagagatccatcggaggtgatgaaatttctcaattccctggtgacatggaagaaggtggatgcatcctga

SEQ ID NO: 377 - protein, 358 aa, Populus tremuloides
MDIESNHSSPVLTDPAPINKSRLGIHSNLKKPGKLDEVCSNACLDAMKSSSPPRKKLIKDGADTAYGTWMLKHPSALNSFEEIANFAKNKKIAMFLDYDGTLSPIVDDPDNALMSDDMRFAVRNFAKYFPTAIISGRSRDKVYQLVGLTELYYAGSHGMDILGPVRKAVSNDHPNCNESTTDQQGKEVNLFQPAREFIPLIDEVFRTLVEDTKGIKGAKVENHKFCVSVHFRNVDEKNWQSIAQCVQDILDKYPRLRKTHGRKVLEVRPMIDWNKGKAVEFLLESLGLSNRDDVLPIYIGDDLTDEDAFKVLREGNRGCGILVSSRPKETNAVYSLRDPSEVMKFLNSLVTWKKVDAS

SEQ ID NO: 378 - DNA, 1119 bp, Triticum aestivum
atggatttgagcaacgcctcaccggtcatcagtgatccgatggcaatgagccagtcgttgatgggagtgctgccttccaacatgatgccgttttcagtcaggcccgggggttactccggcgctggtggcgccggcgtaaacgtcagcaggcgcaagatcgaggaggtcctcgtgagcgggctgctggatgccatgaaatcctcgtcgccacgtaagaagcacaacgtggtcttcggccaggaaaacctgcctgaagaagatcctgcctacagtgcatggatggcaaaatgcccctctgctctggcttccttcaagcagatcgtagccagtgcacaaggcaagaagattgcggtcttcttggactacgatggcacactgtcgccgatcgtcgacgaccctgaaaaagccgtcatgtcccctgtgatgagagctgctgtgagaaacgtcgccaaatacttccccgacgccatcgtcagcgaaaggtcccggaagaaggttcttgaattcgtaaaactgaaggaactctgctatgctggaagtcatgggatggacataatgacatcttcttcagcacattatgaacacaatactgaaaagggcaaagaagccaacctcttccaacctgctcgcgattttctgcctatgatcgatgaggtttccaaggccctcttggaagtcacgagcggaatcgaaggcgcgagagttgaggacaacaagttctgcgtgtctgttcattaccgcaacgtagacgagaaggactgggagctggtcgcacggctcgtaaacgaggtgctggaggacttccccactctcaaagtgaccaacgggcgaatggttttagaggttcgtccggtgatcgactgggacaaggggaaggccgtcgagttcctgcttcagtcgctcgggctgagcgactccgagaacgtgatcccaatctacatcggcgacgaccgcaccgacgaagacgcgttcaaggtgcttcgggagaggaactgcggatacgggatactggtctcgcaggcgcccaaggaaaccgaggccttctactcgctcagggacccgtctgaagtgatggagttcctgaactccttggtgagatggaagaagcactcgctatga

SEQ ID NO: 379 - protein, 372 aa, Triticum aestivum
MDLSNASPVISDPMAMSQSLMGVLPSNMMPFSVRPGGYSGAGGAGVNVSRRKIEEVLVSGLLDAMKSSSPRKKHNVVFGQENLPEEDPAYSAWMAKCPSALASFKQIVASAQGKKIAVFLDYDGTLSPIVDDPEKAVMSPVMRAAVRNVAKYFPDAIVSERSRKKVLEFVKLKELCYAGSHGMDIMTSSSAHYEHNTEKGKEANLFQPARDFLPMIDEVSKALLEVTSGIEGARVEDNKFCVSVHYRNVDEKDWELVARLVNEVLEDFPTLKVTNGRMVLEVRPVIDWDKGKAVEFLLQSLGLSDSENVIPIYIGDDRTDEDAFKVLRERNCGYGILVSQAPKETEAFYSLRDPSEVMEFLNSLVRWKKHSL

SEQ ID NO: 380 - DNA, 1110 bp, Zea mays
atggatatgggcagcggctcgtcacctgtcatcaccgatccgatatcgataagcccaccgctgctgggaggcttgacgtcgaacctgatgccgttctcggtcatgtccggaggctgctcctccagtcctagcatgagcgccagcagcaggcgtaaaatcgaggaggtccttgtcaatggcctgctagacgcgatgaaatcgtcgtcgcctcgcaagaagcacaacctcgccttcggacaggataattcgcccgacgaagatcctgcttacactgcatggctgtcaaaatgcccttctgcgctggcctccttcaagcagatagtagccaacgcacagggcaggaggatcgctgtgttcttggattacgacggcaccctgtcgccgatcgtcgacgatcccgacaaagcgttcatgtcccctgtgatgagagctgctgttagaaatgtcgcgaagtacttccctaccgcgattgtcagcggaaggtcccgtaagaaggtgtttgaatttgtaaaactgacggaactgtactacgctggtagtcacgggatggacatagtgacatctgcagcagcacatgctactgaaaagtgcaaagaagccaatctcttccaacctgcttgcgagtttctccctatgattaatgaggtttccaagtgcctcgtggaggtcacgagttcaattgaaggtgcaagagttgagaacaacaagttctgtgtatctgtacattaccgcaacgtagcagagaaggactggaaagtggtcgcaggactcgtgaaacaagtcttggaggccttccctcgtctcaaagtaaccaacgggcgaatggttttagaggttcgcccggtgatcgactgggacaagggaaaggctgtcgagttcctgcttcggtcgctcggcctaagcgactccgaagatgtggttcctatctacatcggagacgatcgaacagacgaagacgccttcaaggtactgcgagagcgaagctgtggatacggaatcctagtctcgcaggtgcccaaggacactgaagccttctactcgctgagagacccgtctgaagtgatggggttcctcaattccttggtgagatggaagaagcacccgctgtga

SEQ ID NO: 381 - protein, 369 aa, Zea mays
MDMGSGSSPVITDPISISPPLLGGLTSNLMPFSVMSGGCSSSPSMSASSRRKIEEVLVNGLLDAMKSSSPRKKHNLAFGQDNSPDEDPAYTAWLSKCPSALASFKQIVANAQGRRIAVFLDYDGTLSPIVDDPDKAFMSPVMRAAVRNVAKYFPTAIVSGRSRKKVFEFVKLTELYYAGSHGMDIVTSAAAHATEKCKEANLFQPACEFLPMINEVSKCLVEVTSSIEGARVENNKFCVSVHYRNVAEKDWKVVAGLVKQVLEAFPRLKVTNGRMVLEVRPVIDWDKGKAVEFLLRSLGLSDSEDVVPIYIGDDRTDEDAFKVLRERSCGYGILVSQVPKDTEAFYSLRDPSEVMGFLNSLVRWKKHPL

SEQ ID NO: 382 - DNA, 1224 bp, Zea mays
atggatttgaagacaggcctcaattcacctgttattgctgaccatctccctacgttagcattgcctgctgctgtcatgactttcacaacacctactagctttccctctccggggctttgcttgaacactacaaagaagatacctctgcctggtaagattgaagaagttcgtgctgctggatggcttgatctcatgaaggcctcatcacctacccgcaaaaggcagatcaaggatgtcatctgtgatgctcaatctgatcttgatttgcaatactgcaactggacagtgaactatccttctgctttgatctcatttgaggcaattagtgatcttgctgggagtaaaaggttggcattgtttcttgactatgatggaacactttcaccgattgtggacaatcctgaaaatgcattaatgtctgatgagatgcgtgctgcagtgaggcatgcggcatcacttttcccaactgcaatcattagcggaaggtctcgtgataaggtttttgactttgtgaagctaaatgaattgtactacgctggaagccatggaatggacataatgggccctgttaggaagactactgactccaatggcgtggaatgtattcggtcaactgatgtgcatggtaaagaagtcaacctgttccaacctgctagtgagtttttacctatgatcactgaggtatgttgtaccggcctcttgagtttaagttgccatcttatgtcatatggttggacttctgagtggtgtacatgccaggtgtatgaaaaacttggtgagagtgttaaggacattgatggtgcaaggatggaagacaacaagttctgtgtatctgtgcattaccgtaatgtggcggaagatgactataaaaaggttttccatcgtgtaactgctgttttggaaggttacccttgcctaagactaacccatgggaggaaggtttttgaggtccgtcctgttattgattggaacaaaggtaaagctgtggagtttttacttgaatcgcttgggatcagggagagtgaagatgttctgcctatgtatgttggagatgacagaacagatgaagatgcattcaaagttgtgaaggcaagcaacgggggttttggaatattggagtcgtgtagacccaaagagagagaggccttctactccgtgagggatgcagctgaggggagggaatttctgagaatgttggcagcagggaaggagcagtccgggtga

SEQ ID NO: 383 - protein, 407 aa, Zea mays
MDLKTGLNSPVIADHLPTLALPAAVMTFTTPTSFPSPGLCLNTTKKIPLPGKIEEVRAAGWLDLMKASSPTRKRQIKDVICDAQSDLDLQYCNWTVNYPSALISFEAISDLAGSKRLALFLDYDGTLSPIVDNPENALMSDEMRAAVRHAASLFPTAIISGRSRDKVFDFVKLNELYYAGSHGMDIMGPVRKTTDSNGVECIRSTDVHGKEVNLFQPASEFLPMITEVCCTGLLSLSCHLMSYGWTSEWCTCQVYEKLGESVKDIDGARMEDNKFCVSVHYRNVAEDDYKKVFHRVTAVLEGYPCLRLTHGRKVFEVRPVIDWNKGKAVEFLLESLGIRESEDVLPMYVGDDRTDEDAFKVVKASNGGFGILESCRPKEREAFYSVRDAAEGREFLRMLAAGKEQSG

SEQ ID NO: 384 - DNA, 1146 bp, Zea mays
atggatttgaagacaggcctcaattcacctgttattgctgaccatctccctacgttagcattgcctgctgctgtcatgactttcacaacacctactagctttccctctccggggctttgcttgaacactacaaagaagatacctctgcctggtaagattgaagaagttcgtgctgctggatggcttgatctcatgaaggcctcatcacctacccgcaaaaggcagatcaaggatgtcatctgtgatgctcaatctgatcttgatttgcaatactgcaactggacagtgaactatccttctgctttgatctcatttgaggcaattagtgatcttgctgggagtaaaaggttggcattgtttcttgactatgacggaacactttcaccgattgtggacaatcctgaaaatgcattaatgtctgatgagatgcgtgctgcagtgaggcatgcggcatcacttttcccaactgcaatcattagcggaagatctcgtgataaggtttttgactttgtgaagctaaatgaattgtactacgctggaagccatggaatggacataatgggccctgttaggaagactactgactccaatggcgtggaatgtattcggtcaactgatgtgcatggtaaagaagtcaacctgttccaacctgctagtgagtttttacctatgatcactgaggtgtatgaaaaacttggtgagagtgttaaggacattgatggtgcaaggatggaagacaacaagttctgtgtatctgtgcattaccgtaatgtggcggaagatgactataaaaaggttttccatcgtgtaactgctgttttggaaggttacccttgcctaagactaacccatgggaggaaggtttttgaggtccgtcctgttattgattggaacaaaggtaaagctgtggagtttttacttgaatcgcttgggctcagcgagagtgaagatgttctccctatctatgttggagatgacagaacagatgaagatgcattcaaagttctgaaggcaagcaaccgtggctttggaatattggtgtcgtctatacccaaagagagtgacgccttctactccttgagggatccagctgaggtgatggaatttctgagaatgttggcagcatggaaggagcagtccacctga

SEQ ID NO: 385 - protein, 381 aa, Zea mays
MDLKTGLNSPVIADHLPTLALPAAVMTFTTPTSFPSPGLCLNTTKKIPLPGKIEEVRAAGWLDLMKASSPTRKRQIKDVICDAQSDLDLQYCNWTVNYPSALISFEAISDLAGSKRLALFLDYDGTLSPIVDNPENALMSDEMRAAVRHAASLFPTAIISGRSRDKVFDFVKLNELYYAGSHGMDIMGPVRKTTDSNGVECIRSTDVHGKEVNLFQPASEFLPMITEVYEKLGESVKDIDGARMEDNKFCVSVHYRNVAEDDYKKVFHRVTAVLEGYPCLRLTHGRKVFEVRPVIDWNKGKAVEFLLESLGLSESEDVLPIYVGDDRTDEDAFKVLKASNRGFGILVSSIPKESDAFYSLRDPAEVMEFLRMLAAWKEQST

SEQ ID NO: 386 - DNA, 2556 bp, Arabidopsis thaliana
atgatttctaggtcgtacacgaatctgttagacttggcatcagggaatttccctgtcatgggaagagagcgtaggcggcttcctagggtaatgactgttcctggtaatgtctctgagtttgatgaagatcaagcgtatagtgtgtcttccgataatccttcttcggtttcctctgatcgaatgatcattgtggctaaccggctcccattgaaggcggagaaacgaaatggaagctggagttttagttgggatcaagattctctgtatttgcagctcaaggacgggttgcctgaggatatggagattttatatgttggatctttgagcgttgatgttgattcaaatgaacaagacgatgtggcgcagatactgttggacaaatttaaatgtgttcctacgtttttcccacctgatttgcaatcaaagttttacgacggtttttgcaagaggcagatatggccgctttttcactacatgcttccgttttccgctgatcatggtggaagatttgataggtctctttgggaggcttatgtagcgactaacaagctcttcttccagaaagtaattgaggttattaacccagatgatgattttgtctggattcatgactaccatttgatggtcttaccaacttttctgagaaggcggtttaaccggataaggatgggatttttccttcacagtcccttcccctcatctgagatataccggtctcttcctgttcgggaggagatacttaaggcgttactaaacagcgaccttattggctttcacacgttcgattatgctcgtcacttccttacttgctgcagtcggatgttgggtctagaatatcagtctaagagaggttacattgggctggagtattacgggaggactgtgggaatcaagatcatgccagtggggatcaacatgggtcggattcaatcggtgatgagatattcagaagaggagggtaaggtgatggagctcagaaatcgtttcgaaggtaagacagtgttgcttggtatcgatgacatggatattttcaagggtataaacctgaagcttctagcaatggaacaaatgctgaggcagcacccgaattggaggggaagggctgttctggttcagattgtaaatcccgctaggggtaaaggtattgatgtagaggaaatacgtggtgaaatcgaagaaagctgcaggaggatcaatggagagtttgggaaacctggatatcaacctatcatatatattgatactccggtttcgattaatgaaataaatgcttattaccatattgctgagtgcgtggtcgttacagctgttagagatggtatgaaccttactccctacgaatatatcgtttgtagacaaggtttacttgggtctgaatcagactttagtggcccaaagaagagcatgttggttgcatcagagtttattggatgttccccttcgcttagtggggctatacgcgtaaacccatggaacgttgaagctactggagaagcactaaatgaggccctctcaatgagtgatgctgagaaacagctacggcatgagaaacatttccggtatgttagtactcacgatgtagcttattggtcaagaagtttcttgcaagacctagagaggatatgtgtggaccatttcaagaaaaggtgttgggggatggggattagttttggtttcagagttgttgcactcgatcctaattttagaaagctttcaataccgtgcattgtgtcagactacaaaagggcgaaaagcagagcgatactgttggattatgatggcactctgatgcctcaaaactccatcaataaagctccaagccaggaagttcttaactttttggatgcactttgcgaggacaagaagaattcaattttcattgtcagtggaagagggagggaaagtttaagcaagtggttcactccgtgcaaaaaaattggaattgcggcagagcatggatacttcttaaagtggtcaggcagtgaagaatgggagacatgtgggcagagctctgattttgggtggatgcagatcgtggaacctgtaatgaagcagtacactgaatcgactgatggctcttccattgaaatcaaagagagcgctttggtttggcaatatcgggatgcagatccaggctttggttctttacaagcgaaggaaatgctagagcatttagagagtgttctagctaatgagccagtggcagtcaaaagcggtcactacatagtagaagtcaagcctcagggagtgagcaaaggatccgtgtcagaaaagatattttcatcaatggccggaaagggaaaaccggttgatttcgtgttatgtattggagatgacagatctgatgaagacatgtttgaagcgattggtaatgcgatgtcgaaaaggttactctgtgataatgctctagtctttgcatgcacagttgggcaaaagccaagcaaggctaaatactacttggacgatactactgaagtgacatgcatgcttgaatctctagctgaagcatcagaggcttcaaacttttctatgcgtgaacttgatgaagccctttga

SEQ ID NO: 387 - protein, 851 aa, Arabidopsis thaliana
MISRSYTNLLDLASGNFPVMGRERRRLPRVMTVPGNVSEFDEDQAYSVSSDNPSSVSSDRMIIVANRLPLKAEKRNGSWSFSWDQDSLYLQLKDGLPEDMEILYVGSLSVDVDSNEQDDVAQILLDKFKCVPTFFPPDLQSKFYDGFCKRQIWPLFHYMLPFSADHGGRFDRSLWEAYVATNKLFFQKVIEVINPDDDFVWIHDYHLMVLPTFLRRRFNRIRMGFFLHSPFPSSEIYRSLPVREEILKALLNSDLIGFHTFDYARHFLTCCSRMLGLEYQSKRGYIGLEYYGRTVGIKIMPVGINMGRIQSVMRYSEEEGKVMELRNRFEGKTVLLGIDDMDIFKGINLKLLAMEQMLRQHPNWRGRAVLVQIVNPARGKGIDVEEIRGEIEESCRRINGEFGKPGYQPIIYIDTPVSINEINAYYHIAECVVVTAVRDGMNLTPYEYIVCRQGLLGSESDFSGPKKSMLVASEFIGCSPSLSGAIRVNPWNVEATGEALNEALSMSDAEKQLRHEKHFRYVSTHDVAYWSRSFLQDLERICVDHFKKRCWGMGISFGFRVVALDPNFRKLSIPCIVSDYKRAKSRAILLDYDGTLMPQNSINKAPSQEVLNFLDALCEDKKNSIFIVSGRGRESLSKWFTPCKKIGIAAEHGYFLKWSGSEEWETCGQSSDFGWMQIVEPVMKQYTESTDGSSIEIKESALVWQYRDADPGFGSLQAKEMLEHLESVLANEPVAVKSGHYIVEVKPQGVSKGSVSEKIFSSMAGKGKPVDFVLCIGDDRSDEDMFEAIGNAMSKRLLCDNALVFACTVGQKPSKAKYYLDDTTEVTCMLESLAEASEASNFSMRELDEAL

SEQ ID NO: 388 - DNA, 2604 bp, Arabidopsis thaliana
atggtgtcaagatcttgtgcaaattttctagatttagcatcttgggacttattggactttcctcaaactcaaagagctcttcctcgtgtcatgactgttcctggtatcatctctgagttggatggaggctacagtgatggatcctctgatgttaattcctcaaacagctcccgtgagcggaagattatagtggctaatatgttaccattacaagctaagagagatacagaaactggacaatggtgttttagttgggatgaagattctcttctcttgcaactcagagatgggttttcttcggatacagagtttgtttatataggatcacttaatgctgatattggtattagtgaacaagaagaagtttctcataagcttttgttggatttcaattgtgttcctacgtttttacccaaggagatgcaagagaagttctatcttggtttctgtaaacatcatttgtggccgctatttcactatatgcttcctatgttccctgaccatggtgatcgttttgaccggcgtctttggcaagcgtatgtctctgcaaacaagatattttcagatagggtgatggaagttatcaaccctgaggaagattatgtttggattcatgattatcatctgatggttcttcccacattcttgaggaaacggtttaacaggatcaagcttggatttttccttcacagtccatttccatcatcagaaatttaccgtactttgccagtccgggatgatcttttgagaggattgttgaactgtgatctcattggcttccacacatttgattatgcacgccattttttgtcatgctgcagtagaatgcttgggcttgattatgaatctaagcgtgggcacatcgggcttgattactttggtcgaacggtgtttattaagatccttcctgttggcatccatatggggaggctggaatcggttttgaatcttccgtcgactgcagcgaaaatgaaagagatacaagaacagtttaaggggaaaaagttgattcttggtgttgacgacatggacatctttaaaggcataagcctcaaacttatagccatggaacgtctctttgagacatattggcatatgcgaggaaaacttgtcctgattcagatagtgaacccagcacgggccacgggtaaggatgtggaagaagcaaagaaggagacatattcaactgcaaaaaggatcaatgagcgctatggttctgctggttatcagccagtgatcttgattgatcgtcttgttcctcgttacgagaagactgcttattatgctatggcagactgctgcctggtgaatgcagtaagagacggcatgaacttagttccatataaatatatcatttgcaggcaagggaccccaggaatggataaggccatggggattagccatgactcagcccggacgagcatgcttgttgtctctgagtttatcggctgctcgccttctttgagtggtgcgatcagggtgaacccatgggatgtagatgctgttgcagaagcggtaaacttagccctcactatgggtgagactgaaaagcgattaaggcacgagaaacactatcactatgtgagtactcatgatgtgggttactgggcaaagagctttatgcaggatcttgagagggcatgccgggagcattataataaacgttgttggggtattggttttggcttgagtttcagagttctgtcactgtctccgagttttaggaagctatctatcgatcacattgtctccacgtatagaaatacacagagaagggcaatatttttggactatgatggcactctcgttcctgaaagctccatcatcaaaacccctaatgccgaagtcctgtctgttctgaaatctctgtgtggagatcctaaaaacactgtgtttgttgtcagtggaagaggatgggagtctctgagcgactggctatctccatgtgaaaatcttggaatcgcagctgaacacggatacttcataaggtggagtagcaagaaagaatgggagacttgttattcgtcggctgaggcggaatggaagacgatggtagaaccggtaatgagatcatacatggacgcaaccgatggttctactatagagtacaaagagagtgctttggtttggcatcatcaagacgcagatccagactttggagcctgtcaagcaaaagagcttctagatcatctagagagtgtactcgcaaatgagcctgtagtcgtcaagagaggccaacacattgtagaggtcaaaccacagggagtaagcaaaggtctagcagtggaaaaggtgatacaccaaatggtagaggatggaaacccaccggacatggtgatgtgtataggagatgacagatcagacgaagacatgtttgagagcatattgagcacagtgacaaacccggacctcccaatgccacctgagatctttgcctgcacggtgggaagaaaaccaagcaaagccaaatacttcttagacgatgtctctgatgtattaaagctcctaggaggattagctgctgcaacgagcagctcgaagccagagtatcaacaacaatcctcctcattgcacacgcaagtggcgtttgagagcatcatatga

SEQ ID NO: 389 - protein, 867 aa, Arabidopsis thaliana
MVSRSCANFLDLASWDLLDFPQTQRALPRVMTVPGIISELDGGYSDGSSDVNSSNSSRERKIIVANMLPLQAKRDTETGQWCFSWDEDSLLLQLRDGFSSDTEFVYIGSLNADIGISEQEEVSHKLLLDFNCVPTFLPKEMQEKFYLGFCKHHLWPLFHYMLPMFPDHGDRFDRRLWQAYVSANKIFSDRVMEVINPEEDYVWIHDYHLMVLPTFLRKRFNRIKLGFFLHSPFPSSEIYRTLPVRDDLLRGLLNCDLIGFHTFDYARHFLSCCSRMLGLDYESKRGHIGLDYFGRTVFIKILPVGIHMGRLESVLNLPSTAAKMKEIQEQFKGKKLILGVDDMDIFKGISLKLIAMERLFETYWHMRGKLVLIQIVNPARATGKDVEEAKKETYSTAKRINERYGSAGYQPVILIDRLVPRYEKTAYYAMADCCLVNAVRDGMNLVPYKYIICRQGTPGMDKAMGISHDSARTSMLVVSEFIGCSPSLSGAIRVNPWDVDAVAEAVNLALTMGETEKRLRHEKHYHYVSTHDVGYWAKSFMQDLERACREHYNKRCWGIGFGLSFRVLSLSPSFRKLSIDHIVSTYRNTQRRAIFLDYDGTLVPESSIIKTPNAEVLSVLKSLCGDPKNTVFVVSGRGWESLSDWLSPCENLGIAAEHGYFIRWSSKKEWETCYSSAEAEWKTMVEPVMRSYMDATDGSTIEYKESALVWHHQDADPDFGACQAKELLDHLESVLANEPVVVKRGQHIVEVKPQGVSKGLAVEKVIHQMVEDGNPPDMVMCIGDDRSDEDMFESILSTVTNPDLPMPPEIFACTVGRKPSKAKYFLDDVSDVLKLLGGLAAATSSSKPEYQQQSSSLHTQVAFESII

SEQ ID NO: 390 - DNA, 2586 bp, Arabidopsis thaliana
atggggtcaaaatcatttggaaatctattagacttggcctctggggatcttttggacattcctcagactccgagatatcttccaagagtgatgactgttcctggcattatctctgacgttgatggatatggaattagtgatggcgattcagatgtcatttcattaccttgccgtgagcggaaaatcattgtggccaattttcttcctttgaatggtaaaaaggattcagaaactggaaagtggaaattcagtctcgacaatgattctcccctgttacatctcaaggatggtttttctccagagactgaagtcatttatgttggatcgctcaagacgcatgttgatgttagtgagcaagacgaggtttcccataatctttttgaggaattcaattgtgtagcgactttcctcccacaagatgtgcataaaaaattctaccttggcttttgtaaacagcaactatggccacttttccattacatgttacccatgtgtcctgatcatggtgaacggtttgatcgtggtctttggcaggcatatgtttctgccaacaagatatttgcagataaggtaatgggtgtgattaatcttgaagaagattatatctggattcatgactatcatttaatggttctcccaacatttttgagaaggcggtttcacagggttaagcttggtttcttcctccacagtccattcccttcttcagaaatttatcgaaccttacctgttcgagaggaactactaagagggctcttaaattgtgacttaattggttttcacacgtttgattatgcacggcatttcttgtcatgctgctgtagaatgcttggattggagtatgaatctaagagagggcatattgctcttgactacttgggacgtacagtttttctgaagattcttcctataggtattcacatgggaaggctggaatccgttctgaatcttcctgctacagctgaaaagctgaaagagattcaagaaaagtatcggggtaaaaagataattctcggtgttgatgacatggatatattcaaaggtttaagtcttaaaattttggcctttgaacacctccttcagcaatatcctagcatgctagggaaaatagttcttattcagattgtgaacccagccagaggctcaggtaaagacgttcaggaagcgaggaaagaaacgtatgatactgttaaaagaatcaacgagcgttatggttcacatgattatgagccagtggttctgattgatcgccctgttcctcggtttgagaagtctgcctattatgccctggcagaatgctgcatagtcaatgcagtgagggatgggatgaacttagttccgtacaagtacactgtttgtcggcagggaactcctagtatgaataagtctttgggagtaagtgatgatttgcctcgcacaagcacccttgttctgtccgagttcattggttgctcgccttctctaagtggtgcgattagggttaatccttgggacgttgacgcggtagccgattcactatattctgctattaccatgtctgattttgagaagcaactacgacataaaaaacactttcactacattagtacacatgatgtgggttattgggcgcgcagcttttcgcaggatttggagagggcatctcgagatcattacagtaaacggtgctggggtgtgggttggggtttgggtttcaggcttgtcgctctctctcctaatttcagaaggctatccattgagcaaactgttagtgcttacagaagatcgagcaagagagcaatatttcttgattatgatggtactttagttcctgagacctcgattgtaaaggacccaagtgctgaagttatatctgcgttgaaggcactgtgtagtgatcctaacaacactatatttattgttagcgggaggggaaaagtttctttgagcgagtggcttgcgccatgtgagaatcttggaatagcggctgaacatggttactttacaaggtggaataagtcttctgactgggaaacaagcggcttatctgatgaccttgagtggaagaaagttgtggaacctattatgagactttatacagagactactgatggatccaatatagaagcaaaagagagtgctttagtctggcatcaccaagatgctgacccagactttggttcttgtcaagccaaggaactactggaccatctagaaactgttcttgtgaatgaaccagttattgtgaacagaggccaccaaatcgttgaagttaagcctcagggagtaagcaaagggcttgtcaccgggaaaattcttagccgaatgcttgaagatgggatagcgccagattttgtggtatgcattggggatgatagatcagacgaggagatgtttgaaaacatatcaacaaccctctcagctcaatcatcgtcaatgtctacagagatattcgcgtgtactgtgggaagaaaaccgagcaaagccaaatacttcctcgatgaagtaagcgacgtggtgaagttgcttcaaggacttgccaacacttcgagcccaaagcctaggtacccttctcacctcagagtctccttcgaaagcgtggtatga

SEQ ID NO: 391 - protein, 861 aa, Arabidopsis thaliana
MGSKSFGNLLDLASGDLLDIPQTPRYLPRVMTVPGIISDVDGYGISDGDSDVISLPCRERKIIVANFLPLNGKKDSETGKWKFSLDNDSPLLHLKDGFSPETEVIYVGSLKTHVDVSEQDEVSHNLFEEFNCVATFLPQDVHKKFYLGFCKQQLWPLFHYMLPMCPDHGERFDRGLWQAYVSANKIFADKVMGVINLEEDYIWIHDYHLMVLPTFLRRRFHRVKLGFFLHSPFPSSEIYRTLPVREELLRGLLNCDLIGFHTFDYARHFLSCCCRMLGLEYESKRGHIALDYLGRTVFLKILPIGIHMGRLESVLNLPATAEKLKEIQEKYRGKKIILGVDDMDIFKGLSLKILAFEHLLQQYPSMLGKIVLIQIVNPARGSGKDVQEARKETYDTVKRINERYGSHDYEPVVLIDRPVPRFEKSAYYALAECCIVNAVRDGMNLVPYKYTVCRQGTPSMNKSLGVSDDLPRTSTLVLSEFIGCSPSLSGAIRVNPWDVDAVADSLYSAITMSDFEKQLRHKKHFHYISTHDVGYWARSFSQDLERASRDHYSKRCWGVGWGLGFRLVALSPNFRRLSIEQTVSAYRRSSKRAIFLDYDGTLVPETSIVKDPSAEVISALKALCSDPNNTIFIVSGRGKVSLSEWLAPCENLGIAAEHGYFTRWNKSSDWETSGLSDDLEWKKVVEPIMRLYTETTDGSNIEAKESALVWHHQDADPDFGSCQAKELLDHLETVLVNEPVIVNRGHQIVEVKPQGVSKGLVTGKILSRMLEDGIAPDFVVCIGDDRSDEEMFENISTTLSAQSSSMSTEIFACTVGRKPSKAKYFLDEVSDVVKLLQGLANTSSPKPRYPSHLRVSFESVV

SEQ ID NO: 392 - DNA, 2103 bp, Arabidopsis thaliana
atggtttcaagatcgtattcaaatctgttggagttagcttcaggagactcaccaacgtttggacgcatgaaccgacaaatcccacgaatcatggccgttgctggaatcatgtcaaacatcgataatgactctaaagacactgatctgtctcctaaagatcgtatcatcattgtagccaatgaattacctatacgagctcagagaagggttgatggtaatggtagtggtagtagtagtagtagtacttgttgtagcaaaggttggaacttttcttgggatgagaattcacttcttctccaattgaaagatgggttaggagatgaagctattgaagttatctatgttggttgtttgaaagaagagattcctcttaatgagcaagaagaagtgtatcagattcttcttgagagtttcaagtgtgtgcctacgtttttgcctttggatttgtacactagatactaccatggattctgtaagcaacagctttggcctttgtttcattacatgttgccactttctcctgatcttggaggtaggtttgataggactttgtggcaagcttatgtctctgtgaacaagatttttgctgatagaattatggaggtgattaatcctgaggatgattttgtgtggatacatgattatcatttgatggttttgcctactttcttgaggaagaggtttaacagagtcaagcttggtttcttccttcatagtccatttccatcgtctgagatttacaaaactttgcctattcgtgaagagcttcttcgggctttgctaaactcggatttgatagggttccatacttttgactacgctaggcatttcttgtcttgttgtagtcgaatgcttggtcttacttatgaatctaagagaggatacattggacttgagtattatggtagaaccgtgagtatcaaaattctacctgttggaatccacatgggtcagcttcagtcggttttgagcttacccgagactgaaaggaaagtcggggaacttattgaacggtatggtcgaaaaggcaggacgatgctgcttggtgtggatgatatggacattttcaaagggattactttaaagctgttggctatggagcagctgcttatgcaacatcctgaatggcaagggaaggttgtgttggtgcagatagctaatccggcgagagggaaagggaaagatgttaaagagatgcaagctgagacgtattcaactgttaagcggattaatgaaacgtttgggagacccggttacgatcctatagtattgatcgatgcaccgttgaagttctatgaaagggttgcttattacgtagtagctgagtgttgtttggtgacagcggttagggatgggatgaatcttataccttatgagtacatagtttctcgtcaaggaaatgagaaactggacaaaattctgaagctggaggcgaataatcgtaacaagaaaagcatgctggtggtttctgagtttattggttgctctccatcgctaagcggagccattcgtgttaatccatggaatgttgatgcagtagctgatgcaatggatagtgcccttgaagtagctgaaccggagaagcagctaagacatgagaagcattacaagtatgtgagcacacatgatgttggctattgggctcgtagcttcctccaagatcttgagaggagttgtggtgagcatggacgaaggaggtgttggggaattgggtttggtctcagtttcagagttgtggcactagaccagagcttcaggaagctgtcaatggaacacatagtatcagcttataagaggacaaagacacgggctatccttttagactatgatgatactttaatgccacaaggctcgatcgataaaaggccttcatcgaagtcaatcgacatattgaacaccttgtgtagggacaagggcaatctggtgttcattgttagtgctaaaagccgagaaactctatcggactggtttagtccttgtgagaagcttggtattgctgctgaacatggctattttctgaggtattcaaccaaaactttttattttctagcattacctttatatcttataactcaagctccatctaactactacacaggctaa

SEQ ID NO: 393 - protein, 700 aa, Arabidopsis thaliana
MVSRSYSNLLELASGDSPTFGRMNRQIPRIMAVAGIMSNIDNDSKDTDLSPKDRIIIVANELPIRAQRRVDGNGSGSSSSSTCCSKGWNFSWDENSLLLQLKDGLGDEAIEVIYVGCLKEEIPLNEQEEVYQILLESFKCVPTFLPLDLYTRYYHGFCKQQLWPLFHYMLPLSPDLGGRFDRTLWQAYVSVNKIFADRIMEVINPEDDFVWIHDYHLMVLPTFLRKRFNRVKLGFFLHSPFPSSEIYKTLPIREELLRALLNSDLIGFHTFDYARHFLSCCSRMLGLTYESKRGYIGLEYYGRTVSIKILPVGIHMGQLQSVLSLPETERKVGELIERYGRKGRTMLLGVDDMDIFKGITLKLLAMEQLLMQHPEWQGKVVLVQIANPARGKGKDVKEMQAETYSTVKRINETFGRPGYDPIVLIDAPLKFYERVAYYVVAECCLVTAVRDGMNLIPYEYIVSRQGNEKLDKILKLEANNRNKKSMLVVSEFIGCSPSLSGAIRVNPWNVDAVADAMDSALEVAEPEKQLRHEKHYKYVSTHDVGYWARSFLQDLERSCGEHGRRRCWGIGFGLSFRVVALDQSFRKLSMEHIVSAYKRTKTRAILLDYDDTLMPQGSIDKRPSSKSIDILNTLCRDKGNLVFIVSAKSRETLSDWFSPCEKLGIAAEHGYFLRYSTKTFYFLALPLYLITQAPSNYYTG

SEQ ID NO: 394 - DNA, 2571 bp, Arabidopsis thaliana
atggtgtcaagatcttgtgctaattttctagacttatcatcttgggaccttttagattttcctcaaactccacgaactcttccacgcgtcatgactgttccgggaatcatcaccgacgtagacggtgatacaacctccgaagtaacttctacctccggtggttcacgtgagaggaagatcattgtagctaacatgttaccactccaatctaaaagagatgcagaaactggtaaatggtgttttaactgggacgaagactctctccagttacaacttagagatgggttctcttcagaaacagagtttctctacgttggatcacttaacgtagacatcgaaactaacgaacaagaagaagtttcacagaagcttttagaggaatttaactgcgttgcaacgtttttgtctcaagagttgcaagaaatgttctatcttggtttctgtaaacatcagttatggccactctttcattacatgcttccaatgtttcctgatcatggtgatcgttttgatcgacgtctatggcaagcttatgtatcagccaacaagatattttcagatagagttatggaagttatcaaccctgaggatgattacgtttggattcaagattatcatcttatggttcttcctactttcttgaggaaacgttttaataggatcaaactcggtttcttccttcatagtccgtttccttcttcagagatttaccgcacattgcctgttcgtgacgagattttgagaggtttgttgaattgtgatctcattggtttccatacgtttgattacgcgaggcatttcttgtcttgttgtagtagaatgcttggtcttgattacgagtctaagcgcggtcacataggtcttgattactttggtaggactgtgtatatcaaaatacttcctgttggtgttcatatgggtagattggagtctgttttgagtcttgattctactgcggcgaagacgaaagagattcaagaacagtttaaagggaagaagcttgttcttggtatcgatgatatggatatatttaaagggataagcttaaagcttatagcaatggaacatctctttgagacttattggcatttgaaagggaaagttgttcttgttcagatagtgaaccctgcaagatcttctggtaaagatgttgaagaagcgaagagggagacgtatgagactgcgaggaggatcaatgagcgttacggtacttctgactataagccgatagttttgatcgatcgtcttgttccacgttctgagaaaaccgcgtattatgctgcagcagattgttgcttagtgaatgcagtgagagatggtatgaacttagttccttataagtatatcgtctgcaggcaggggactcgaagtaataaggccgttgtggattcatcgcctcgcacaagcactcttgtcgtgtctgagtttattggatgctcaccttctttgagtggtgccattagggtgaatccatgggatgtggatgctgttgctgaagcggtaaactcggctcttaaaatgagtgagactgagaagcaactacggcatgagaaacattatcattatattagcactcatgatgttggttattgggcaaagagctttatgcaggatcttgagagagcgtgccgagatcattatagtaaacgttgttgggggattggttttggtttggggttcagagttttgtcactctctccaagttttaggaagctatctgtggaacacattgttccagtttatagaaaaacacagagaagagctatatttcttgattatgatggtactcttgttcctgaaagctccattgttcaagatccaagcaacgaggttgtctctgttctgaaagctctctgtgaagatccgaataacacggtgtttattgttagtggaagaggtagagagtctctgagcaattggctatctccttgtgaaaatcttggaatagcagctgaacatggatacttcattagatggaagagcaaagatgagtgggagacttgttattcgcctacggatacagagtggaggtcaatggtggaaccggttatgagatcgtatatggaggcaacagatgggacgagtatagagtttaaagaaagtgctttggtgtggcaccatcaagacgcagatcctgactttggatcatgtcaagctaaggagatgcttgatcatctagagagtgttctcgccaatgagcctgtggttgtcaagagaggtcaacacatcgttgaagtcaaaccacaaggtgtaagcaaaggtctagctgcggagaaagtaatccgagaaatggtagaacgcggggagccaccggaaatggtgatgtgcataggagacgatagatcagacgaagacatgtttgagagcatattaagcacagtgacaaatccggaacttcttgtgcagccagaggtttttgcatgcacggttggaagaaaaccaagcaaagctaaatacttcttggacgatgaagccgacgtgcttaagctcctaagaggtcttggagactcatcatcgagcttaaaacctagttcttctcacacacaagttgcatttgaaagcatcgtttaa

SEQ ID NO: 395 - protein, 856 aa, Arabidopsis thaliana
MVSRSCANFLDLSSWDLLDFPQTPRTLPRVMTVPGIITDVDGDTTSEVTSTSGGSRERKIIVANMLPLQSKRDAETGKWCFNWDEDSLQLQLRDGFSSETEFLYVGSLNVDIETNEQEEVSQKLLEEFNCVATFLSQELQEMFYLGFCKHQLWPLFHYMLPMFPDHGDRFDRRLWQAYVSANKIFSDRVMEVINPEDDYVWIQDYHLMVLPTFLRKRFNRIKLGFFLHSPFPSSEIYRTLPVRDEILRGLLNCDLIGFHTFDYARHFLSCCSRMLGLDYESKRGHIGLDYFGRTVYIKILPVGVHMGRLESVLSLDSTAAKTKEIQEQFKGKKLVLGIDDMDIFKGISLKLIAMEHLFETYWHLKGKVVLVQIVNPARSSGKDVEEAKRETYETARRINERYGTSDYKPIVLIDRLVPRSEKTAYYAAADCCLVNAVRDGMNLVPYKYIVCRQGTRSNKAVVDSSPRTSTLVVSEFIGCSPSLSGAIRVNPWDVDAVAEAVNSALKMSETEKQLRHEKHYHYISTHDVGYWAKSFMQDLERACRDHYSKRCWGIGFGLGFRVLSLSPSFRKLSVEHIVPVYRKTQRRAIFLDYDGTLVPESSIVQDPSNEVVSVLKALCEDPNNTVFIVSGRGRESLSNWLSPCENLGIAAEHGYFIRWKSKDEWETCYSPTDTEWRSMVEPVMRSYMEATDGTSIEFKESALVWHHQDADPDFGSCQAKEMLDHLESVLANEPVVVKRGQHIVEVKPQGVSKGLAAEKVIREMVERGEPPEMVMCIGDDRSDEDMFESILSTVTNPELLVQPEVFACTVGRKPSKAKYFLDDEADVLKLLRGLGDSSSSLKPSSSHTQVAFESIV

SEQ ID NO: 396 - DNA, 2589 bp, Arabidopsis thaliana
atgtcgccggaatcttggaaagaccagcttagtctggtttcggctgatgattatcggatcatgggtcgaaatcggatccccaatgccgtcacgaagctttccggtctcgaaaccgacgatcctaacggcggcgcgtgggttacgaaaccgaaacgaatcgtggtttcgaatcagcttcctcttcgtgctcacagagacatttcgtcgaacaagtggtgctttgaattcgacaatgacagtctttacttacaactcaaagatgggtttcctccggagacggaagtcgtctacgtcggatctttaaacgccgacgtcttaccttcagagcaagaggacgtctctcagttcttgcttgagaagtttcagtgtgttcctactttcttacctagtgacttgctcaacaagtattaccatggtttctgtaaacactatctctggcccatttttcactatcttcttcctatgacgcaagctcaaggctctctctttgatcgttcgaattggagagcgtacacgactgttaacaagatcttcgctgataagatcttcgaagtgctaaacccggatgatgattacgtctggattcatgattatcacctcatgattttgcccacttttttgaggaacaggtttcatcggataaagcttgggattttcctccatagtccctttccttcgtcggagatttaccgtactcttcctgtgagagacgagattctcaaagggtttctgaattgcgatttggttggtttccacacgtttgattacgctaggcatttcttgtcttgttgtagtaggatgcttggtcttgattacgaatctaaaagaggctacattggtcttgaatattttggaagaacggtgagcatcaagatattgcccgttgggattcatatggggcagattgaatcgataaaggcttcggagaaaactgcagagaaagtgaagagattgagagaaaggttcaaggggaacattgtgatgttaggtgtggatgatttggatatgttcaaaggtattagcttgaagttttgggcgatgggtcagcttcttgaacagaacgaagagcttcgtgggaaagtggttctcgtgcagattactaatcctgctcgtagttcaggtaaggatgttcaagatgtagagaaacagataaatttgattgctgatgagatcaattctaaatttgggagacctggtggttataagcctattgtgtttatcaatggacctgttagtactttggataaagttgcttattacgcgatctcggagtgtgttgtcgtgaatgctgtgagagatgggatgaatttggtgccttataagtacacagtgactcggcaagggagccctgctttggatgcagctttaggttttggggaggatgatgttaggaagagtgtgattattgtttctgagttcatcggttgttctccatctctgagtggtgcgatccgtgttaatccgtggaacatcgatgcagtcactaacgccatgagctctgcaatgacgatgtccgacaaagagaaaaatctgcgccaccagaagcatcataagtacataagctctcacaatgttgcctattgggcgcggagttatgaccaagatcttcaaagggcgtgcaaagatcattacaacaagagattctggggagtcggattcggtctttttttcaaggttgttgcgttagatccgaatttcagaaggctctgtggtgaaaccatagtccccgcgtataggagatcaagcagtaggttgatcctattggactatgatgggacaatgatggatcaggatactctggataaaaggccaagtgatgatcttatctcgcttctcaatcgcttatgtgacgaccccagcaatctagtctttattgttagtggtcgaggtaaggaccctctcagcaaatggtttgactcttgcccaaatcttggtatctcagctgaacatggttatttcactagatggaactcaaattccccttgggaaacaagtgaattgcctgcggatttaagctggaagaaaatagctaaaccagtgatgaatcactatatggaagcgactgatggatcattcatagaggagaaagagagtgctatggtgtggcaccaccaagaagctgaccattcatttggttcttggcaagctaaggagcttcttgatcatctagagagtgttctcaccaatgagcctgttgttgtcaagagaggccagcacatagtagaagttaaacctcagggagtaagcaaaggaaaggtggtggagcatttgatagcaacgatgaggaacaccaaagggaagagaccggactttttgttgtgcataggtgatgaccggtctgatgaagacatgtttgatagcatagtgaagcaccaagatgtttcctctattggtctcgaagaggtctttgcgtgcacagttggtcagaaaccgagcaaggccaagtactatctcgatgataccccaagtgttatcaagatgcttgaatggttggcctcagcttcagatggatcaaagcatgagcaacagaagaaacagagcaagttcacttttcaacagcctatgggacaatgtcgaaagaaagcatag

SEQ ID NO: 397 - protein, 862 aa, Arabidopsis thaliana
MSPESWKDQLSLVSADDYRIMGRNRIPNAVTKLSGLETDDPNGGAWVTKPKRIVVSNQLPLRAHRDISSNKWCFEFDNDSLYLQLKDGFPPETEVVYVGSLNADVLPSEQEDVSQFLLEKFQCVPTFLPSDLLNKYYHGFCKHYLWPIFHYLLPMTQAQGSLFDRSNWRAYTTVNKIFADKIFEVLNPDDDYVWIHDYHLMILPTFLRNRFHRIKLGIFLHSPFPSSEIYRTLPVRDEILKGFLNCDLVGFHTFDYARHFLSCCSRMLGLDYESKRGYIGLEYFGRTVSIKILPVGIHMGQIESIKASEKTAEKVKRLRERFKGNIVMLGVDDLDMFKGISLKFWAMGQLLEQNEELRGKVVLVQITNPARSSGKDVQDVEKQINLIADEINSKFGRPGGYKPIVFINGPVSTLDKVAYYAISECVVVNAVRDGMNLVPYKYTVTRQGSPALDAALGFGEDDVRKSVIIVSEFIGCSPSLSGAIRVNPWNIDAVTNAMSSAMTMSDKEKNLRHQKHHKYISSHNVAYWARSYDQDLQRACKDHYNKRFWGVGFGLFFKVVALDPNFRRLCGETIVPAYRRSSSRLILLDYDGTMMDQDTLDKRPSDDLISLLNRLCDDPSNLVFIVSGRGKDPLSKWFDSCPNLGISAEHGYFTRWNSNSPWETSELPADLSWKKIAKPVMNHYMEATDGSFIEEKESAMVWHHQEADHSFGSWQAKELLDHLESVLTNEPVVVKRGQHIVEVKPQGVSKGKVVEHLIATMRNTKGKRPDFLLCIGDDRSDEDMFDSIVKHQDVSSIGLEEVFACTVGQKPSKAKYYLDDTPSVIKMLEWLASASDGSKHEQQKKQSKFTFQQPMGQCRKKA

SEQ ID NO: 398 - DNA, 2589 bp, Arabidopsis thaliana
atggtatcaagatcttattcaaacctcttggatcttgcttctggtaacttccattcgttttctcgagaaaagaagaggtttccaagagtagcaactgtcactggtgtcttatctgagctagatgatgataacaacagcaacagtgtctgctctgatgctccttcttccgtcacacaagatcgaatcatcatcgttggaaaccagcttcctattaaatcacatcggaactctgctggtaaattgagttttagttgggacaatgactcgcttctcttgcagcttaaagatggtatgcgtgaagatatggaagttgtctacattggttgccttaaggaacagattgatacagttgagcaagatgatgtttctcaaaggttgcttgagaatttcaaatgtgttcctgcttatatcccacctgagctattcactaagtactatcatggattctgtaagcaacatctatggcctttgtttcactacatgcttcccttaactcctgatcttggtggtagatttgatcgttctttatggcaagcttatctttcggttaacaagatctttgctgataaagtgatggaagtgattagtcctgatgatgattttgtttgggttcatgactatcacttaatggttttgcctacatttctaaggaagaggtttaatagagtaaagcttggttttttccttcatagcccgttcccttcctctgagatttaccgtactcttccagtgagaaatgagctcttacgtgcactcctcaacgctgatttgattggctttcatacctttgactatgcaagacacttcctttcttgttgtagcaggatgcttggtttatcctatcagtccaaacgtggaaccatagggcttgagtattatggtcgaacggttagtatcaagattcttcctgtggggattcatatcagccagcttcagtcaattttaaacctcccagagactcagaccaaagttgctgagctaagagatcagttcttggatcagaaagttcttctcggtgttgatgacatggacatcttcaaaggaatcagcctcaaactcttggcaatggaacaacttctcacacagcatcccgagaagagaggtcgagttgtacttgtccagattgcaaaccctgcaagaggtcgtgggaaagacgttcaggaggttcagtctgaaactgaagccacggttaaaaggatcaatgaaatgtttggaaggccgggctaccaacccgtggttctgattgatacaccgcttcaattctttgagaggattgcttactatgtcattgcagagtgttgtcttgttacagcggtaagagatggtatgaatcttataccttatgagtacattatctgcaggcaaggtaatccgaaactcaacgagactataggccttgacccttctgctgcaaagaagagtatgcttgttgtctctgagtttattggttgttctccttctttaagcggcgccattagagtaaatccgtggaacattgatgctgtgactgaagcaatggactatgcattgatagtttcagaagcagagaagcaaatgcgtcacgagaagcatcacaaatatgttagcacacatgatgttgcttattgggcgcgtagctttatacaagatcttgaaagggcttgcggggatcatgtgaggaagaggtgttgggggattggattcgggttaggctttagagttgtggcgcttgatccgagttttaaaaagctttcgattgagcacattgtctcagcttataagagaaccaagaaccgagccattttgttggattatgatggcacaatggtgcagccaggttccattaggacaacaccaacccgcgaaacaatcgaaatcttgaacaacctgtctagtgatcccaagaatatcgtgtacctcgtcagtgggaaagacagaaggacactaactgaatggttttcttcatgtgacgatctcggtttgggtgcagagcacgggtattttataaggccaaatgatggaacagactgggaaacgtcgagtttggtatcaggttttgagtggaaacaaatagcagagccagtgatgagactttacactgagactacagatggatcaacaatagagactaaagagactgctctcgtttggaattaccaattcgcagatcctgattttggatcttgtcaagccaaagagcttatggaacacctcgaaagcgtgcttaccaatgatccagtctctgtcaagactggacaacaactcgttgaagttaaaccacagggtgtgaacaaaggtcttgtggcagagaggcttctaacaacgatgcaagaaaaagggaaacttttggatttcattctctgcgtcggtgatgatcggtctgatgaggatatgtttgaggtgataatgagtgctaaagatggtccagctttgtctcctgtggctgagatattcgcttgcaccgttggacaaaagccaagcaaagcaaaatactatttagacgatactgcggagataatcagaatgctggacggtctagccgctaccaacacaactatctctgatcaaactgattcaaccgccactgttccaactaaagatctgttttaa

SEQ ID NO: 399 - protein, 862 aa, Arabidopsis thaliana
MVSRSYSNLLDLASGNFHSFSREKKRFPRVATVTGVLSELDDDNNSNSVCSDAPSSVTQDRIIIVGNQLPIKSHRNSAGKLSFSWDNDSLLLQLKDGMREDMEVVYIGCLKEQIDTVEQDDVSQRLLENFKCVPAYIPPELFTKYYHGFCKQHLWPLFHYMLPLTPDLGGRFDRSLWQAYLSVNKIFADKVMEVISPDDDFVWVHDYHLMVLPTFLRKRFNRVKLGFFLHSPFPSSEIYRTLPVRNELLRALLNADLIGFHTFDYARHFLSCCSRMLGLSYQSKRGTIGLEYYGRTVSIKILPVGIHISQLQSILNLPETQTKVAELRDQFLDQKVLLGVDDMDIFKGISLKLLAMEQLLTQHPEKRGRVVLVQIANPARGRGKDVQEVQSETEATVKRINEMFGRPGYQPVVLIDTPLQFFERIAYYVIAECCLVTAVRDGMNLIPYEYIICRQGNPKLNETIGLDPSAAKKSMLVVSEFIGCSPSLSGAIRVNPWNIDAVTEAMDYALIVSEAEKQMRHEKHHKYVSTHDVAYWARSFIQDLERACGDHVRKRCWGIGFGLGFRVVALDPSFKKLSIEHIVSAYKRTKNRAILLDYDGTMVQPGSIRTTPTRETIEILNNLSSDPKNIVYLVSGKDRRTLTEWFSSCDDLGLGAEHGYFIRPNDGTDWETSSLVSGFEWKQIAEPVMRLYTETTDGSTIETKETALVWNYQFADPDFGSCQAKELMEHLESVLTNDPVSVKTGQQLVEVKPQGVNKGLVAERLLTTMQEKGKLLDFILCVGDDRSDEDMFEVIMSAKDGPALSPVAEIFACTVGQKPSKAKYYLDDTAEIIRMLDGLAATNTTISDQTDSTATVPTKDLF

SEQ ID NO: 400 - DNA, 2607 bp, Ginkgo biloba
atgatgtcaagatcttatacaaatcttatggatctggccacggggaatttcccggcctttggacgagctaccaagcggcttcctagagtcatgactgtgcctgggatcatctctgagctcgacgatgacaatagcaatagtgtgtcatcagatgtgccttcttccatctgccaggagcgcatgatcattgtagctaaccagcttcctttgcgggcacagaggaggccagataatagaggctgggcttttagttgggacgaggattctttgcttttgcagctcaaggatggcttagcagaggatatggaagtagtctatgttggtagcttgaaggtggaagttgaccttagcgaacaagatgatgttgcacagattctacttgaaaatttcaagtgcgtgccagcttttctccctccggaacttttgaccaaattttaccatggattctgcaagcagcagctctggccactattccattatatgttacctctttctccagatcacggaggtcgctttgatcggtctctctggcaggcttatgtatctgcaaataagatttttgcagacaaggtaatggaggtgatcagccctgatgatgactatgtctgggtgcacgattaccatctcatggtcctgcctacgtttcttaggaagcgatctaacagggtgaagcttggttttttcctgcacagccccttcccttcatcggaaatctaccgaactcttcctgttagagatgagattcttagggccctcctgaactcagatttgattggtttccataccttcgactatgcgaggcattttctatcctgctgcagcaggatgctgggtcttgagtatgaatctaagagagggtacattgggttggaatactatggccggactgtgggcattaagatcctccctgtgggcatacacatgggtcagcttgaatctgtgttgaatcttgctgacacagagtggagagtcggagaactgagggaccagttcaaggggaaaattcttcttcttggtgtcgatgacatggatatcttcaaaggcatcagcttgaagtttctggcaatggagcagctacttaagctgcatccagagtggagaggcaaggtagtgttagtgcagattgctaatcctgcaaggggtaggggcaaagatgtggaggatgtgcaagctgagacacattctacggccaagagaataaatgaaacctttgggcgcccgggctatgaacctgtggtgttgatagacagacctgttcctttctatgagagaatagccttctacaccattgcagaatgttacgtaataactgctgtgagggatgggatgaatctcactccctatgaatacattgtttgcaggcaggggagtccaagattgaatgaaaccttgggagtgagtccgaatgtttcgaagaagagcatgctggttgtgtctgagtttattggatgctcaccttctctcagcggggctatcagggtcaatccttggaacattgatgctgtagctgaggccatgagcacagccattacaatgcctgagacggaaaaacaactaagacatgaaaaacattacaggtatgttagtacccatgatgtggggtattgggcacacagttttatgcaagatctagagagagcgtgcaaggatcacttccgtaggaggtgctggggtattgggtttgggttgggattcagggtagtagcacttgatccaaacttcagaaagctttcaacagagcacattgtctctgcatacaagaggaccaagagtagggcaatattgttggactatgatggtacaatgatgcctcagacttctatcaacaaaactcctgggtcggaggtgctttttattttgaacagcttgtgcagtgatccaaagaatgttgttttcattgttagtggaaggggaaggcagactcttagtcaatggttgtctccttgcgaaatgttggggattgcagcagagcatggctattttataaggtggactcgagatgcagaatgggaaacttgtgttcagggtgtagattttggttggaaacaaataacggagcctgtcatgaaattatatactgagactacggatggctctgtaattgaaacaaaagagagcgctttggtttggcatcatcaagatgctgatccggactttggttcctgtcaggcaaaggagcttctagatcatttggagagtgtacttgcaaatgagcctgtggttgtcaaaagtggtcaacatattgtagaggtgaaacctcagggtgtgagcaagggcctagtagcagagcgacttctttcaataatggtgcaaaatgacaagcgaccagactttgtcatgtgcattggagatgacagatcagatgaagacatgtttgaggggataacaagtgctatggcaggaccttcactttctccaatagcagaagtatttgcatgtactgttggtcagaagcccagcaaagcaaagtactatcttgatgatactgtagaagttctaagaatgcttcagggtctggcggctgcctctgatcaaacagcaaagacttcatctgatcaagcagcaaagaatccatctgctcaagtagctcttgagtgctcactttga

SEQ ID NO: 401 - protein, 868 aa, Ginkgo biloba
MMSRSYTNLMDLATGNFPAFGRATKRLPRVMTVPGIISELDDDNSNSVSSDVPSSICQERMIIVANQLPLRAQRRPDNRGWAFSWDEDSLLLQLKDGLAEDMEVVYVGSLKVEVDLSEQDDVAQILLENFKCVPAFLPPELLTKFYHGFCKQQLWPLFHYMLPLSPDHGGRFDRSLWQAYVSANKIFADKVMEVISPDDDYVWVHDYHLMVLPTFLRKRSNRVKLGFFLHSPFPSSEIYRTLPVRDEILRALLNSDLIGFHTFDYARHFLSCCSRMLGLEYESKRGYIGLEYYGRTVGIKILPVGIHMGQLESVLNLADTEWRVGELRDQFKGKILLLGVDDMDIFKGISLKFLAMEQLLKLHPEWRGKVVLVQIANPARGRGKDVEDVQAETHSTAKRINETFGRPGYEPVVLIDRPVPFYERIAFYTIAECYVITAVRDGMNLTPYEYIVCRQGSPRLNETLGVSPNVSKKSMLVVSEFIGCSPSLSGAIRVNPWNIDAVAEAMSTAITMPETEKQLRHEKHYRYVSTHDVGYWAHSFMQDLERACKDHFRRRCWGIGFGLGFRVVALDPNFRKLSTEHIVSAYKRTKSRAILLDYDGTMMPQTSINKTPGSEVLFILNSLCSDPKNVVFIVSGRGRQTLSQWLSPCEMLGIAAEHGYFIRWTRDAEWETCVQGVDFGWKQITEPVMKLYTETTDGSVIETKESALVWHHQDADPDFGSCQAKELLDHLESVLANEPVVVKSGQHIVEVKPQGVSKGLVAERLLSIMVQNDKRPDFVMCIGDDRSDEDMFEGITSAMAGPSLSPIAEVFACTVGQKPSKAKYYLDDTVEVLRMLQGLAAASDQTAKTSSDQAAKNPSAQVALECSL

SEQ ID NO: 402 - DNA, 2586 bp, Gossypium hirsutum
atggcatcaagatcatgtgcaaattttttacacttagcctctgggaatctacttgatattcctcaaactccgagaggtcttcctcgggtaatgactgttcctgggattatctctgacatggactcttgtagcagtaatgatggggattcagatgttgcttcatctgggtgtagagaacgcaaaattatagtggcaaatatgttacctttgcatgctaaaagagatcgtgaaacttcgaaatggcgcttcagctgggatgaggattcacttttactacatctaaaggatgagttttctcctgaaatggaggttgtatacgtaggatctctcaaggttgatatagatgtgaatgaacaggaagaagttgcccaaaagctgttagaagatttcaattgcgtccctacatttgtacctcatgatttgcagaagaagttttatcttggcttctgcaaacagcatttgtggcctctttttcactacatgctgcccatgtgtcctgaccatggtgatcggtttgaccgcattttatggcaggcatatgtttctgctaataaaatatttgctgacaaggttatggaagtaatcaatccagatgatgattatgtctggattcatgattatcatttgatggttcttcccacatttttgaggaagcacctgaatagaatcaagcttggttttttcctccacagcccgtacccttcatcagaaatatatcgaacattgcctgttcgggatgaaattctgaggggactactgaattgcgatctaattggttttcatacgttcgattatgcacgacatttcttatcttgctgcagtagaatgctgggtcttgattatgaatctaaaagagggcatattggtcttgattactttggtcgcacggtttttattaagattctacctgtaggagttcatatgggtagacttgaatcagtcttgaatctttcctctactgctgccagggtcaaagagattcagaaacagtttgaagggaaaaaattgattcttggcatagatgatatggatattttcaaaggcatcagtcttaaattactggctgtggaacagctcttacagcagcacccagacctgcagggtaaaatagtcctggttcagattgtgaatcctgcaaggggctttggaaaggatgtccaggaggctaagaaggagacttatatgactgctaaaaagatcaatgaggtttatggttcccccaattatcagccagtgattttgattgatcgccctgttccccgttatgagaaatcggcctattatgcgctagcagaatgttgcatagtaaatgctgtgagggatgggatgaacctggttccttacaagtatattgcttgtcggcagggaactcctggcatggatgaggcactgggtgtaaagccagaatatccacgaacaagcatgcttgttgtttctgagctcatcggttgctcaccgtctttaagtggagcaattagggtaaatccatgggatatcgatgctgtggctgaggctttaaatacagctattaccaagcccgagtcagagaagcaattgcgacatgagaaacactaccggtatgtcagtactcatgatgtggcatattgggctcgcagctttgtgatggacttggatagagcatgccaggatcactatagtaaacgttgctggggcattggtttgggcctcagtttcagagttgtgtctctttcacctagttttaggaggctagctatcgatcacatttgttcggcatatagacgaacaaatagaagagcaatattcctggactatgatggcactcttgttcctgaagcttccattatcaaaactcctagccctgaggttatctgtatcattaagaccctctgtgatgatcctaagaacacagtgtttattgttagtgggagaggaagagcttcgcttagtgattggcttgctccatgtgagaagctggggatagccgctgaacacgggtacttcataagatggagtaaagactctgaatgggaaaccagccctgttggtgctgaccttgaatggaaaaagattgtggaacctgttatgagcttgtatagagaggcaactgatggctccagcatagagaccaaggagggtggtttggtgtggcaccatctagatgcagaccctgacttcggatcatgccaagccaaggaattgttggatcatttggaaagtgttctcgcaaatgaaccagcggttgtccatagaggccagcatattgttgaagttaagccgcagggagtaagcaaagggctagtagcagaaaaagttttgtcgagaatggtcaatggtgggaagccacctgatttcgtgatgtgtgttggtgatgataaatccgatgaagatatgtttcagagcatattaacttcagtttctaatccatccttgcctgtggctccggaaatctttgcatgcacagtggggcgaaagcctagcaaagctaggtattacctcgatgacactgcagatgttttaaagttacttaaaggccttgcaactgctacaatttcaaagcctaggtgcctgcctgagattaaggtatctttcgagagtaatgcttga

SEQ ID NO: 403 - protein, 861 aa, Gossypium hirsutum
MASRSCANFLHLASGNLLDIPQTPRGLPRVMTVPGIISDMDSCSSNDGDSDVASSGCRERKIIVANMLPLHAKRDRETSKWRFSWDEDSLLLHLKDEFSPEMEVVYVGSLKVDIDVNEQEEVAQKLLEDFNCVPTFVPHDLQKKFYLGFCKQHLWPLFHYMLPMCPDHGDRFDRILWQAYVSANKIFADKVMEVINPDDDYVWIHDYHLMVLPTFLRKHLNRIKLGFFLHSPYPSSEIYRTLPVRDEILRGLLNCDLIGFHTFDYARHFLSCCSRMLGLDYESKRGHIGLDYFGRTVFIKILPVGVHMGRLESVLNLSSTAARVKEIQKQFEGKKLILGIDDMDIFKGISLKLLAVEQLLQQHPDLQGKIVLVQIVNPARGFGKDVQEAKKETYMTAKKINEVYGSPNYQPVILIDRPVPRYEKSAYYALAECCIVNAVRDGMNLVPYKYIACRQGTPGMDEALGVKPEYPRTSMLVVSELIGCSPSLSGAIRVNPWDIDAVAEALNTAITKPESEKQLRHEKHYRYVSTHDVAYWARSFVMDLDRACQDHYSKRCWGIGLGLSFRVVSLSPSFRRLAIDHICSAYRRTNRRAIFLDYDGTLVPEASIIKTPSPEVICIIKTLCDDPKNTVFIVSGRGRASLSDWLAPCEKLGIAAEHGYFIRWSKDSEWETSPVGADLEWKKIVEPVMSLYREATDGSSIETKEGGLVWHHLDADPDFGSCQAKELLDHLESVLANEPAVVHRGQHIVEVKPQGVSKGLVAEKVLSRMVNGGKPPDFVMCVGDDKSDEDMFQSILTSVSNPSLPVAPEIFACTVGRKPSKARYYLDDTADVLKLLKGLATATISKPRCLPEIKVSFESNA

SEQ ID NO: 404 - DNA, 2637 bp, Oryza sativa
atgttctcgcgatcctacaccaacctggtcgatctcgccaacggcaacctctccgccctggactatggtggcggagggggagggggcggcggcggcaacggggccgggggccggccgccgcgggcgaggcggatgcagcggacgatgacgacgcccgggacgctggcggagctcgacgaggagcgggccgggagcgtcacctccgacgtgccctcgtcgctcgccagcgaccgcctcatcgtcgtcgccaacaccctccccgtgcgctgcgagcgccgccccgacgggcgcgggtggagcttctgctgggacgaggactccctcctcctccacctccgcgacggcctccccgatgacatggaggtcctctacgtcggctccctccgcgccgacgtgccgtccgccgagcaggacgacgtcgcgcaggcgctcctcgaccggttccgctgcgtcccggctttcctccccaaggacgtcttggacagattctaccatggcttctgcaagcagacgctgtggccgctcttccactacatgctccccttcacctccgaccatggcggccgcttcgatcgctcccagtgggaggcatacgtcctcgccaacaagctcttctcccagcgcgtcatcgaggtcctcaaccccgaggatgactacatctggatccacgattaccacctcctcgccctcccgtccttccttcgccgtcggttcaacaggctccgcatcggtttcttcctgcacagcccgttcccttcgtcggaactctaccgttccctccctgttcgcgacgagatcctcaaatcactgctaaactgcgatctgattgggttccacacctttgattacgcgcggcatttcctgtcctgctgcagccggatgctggggatcgagtaccagtcgaagaggggatatatcggtctcgattactttggccgcactgttgggataaagatcatgcctgttgggattaacatgacgcagctgcagacgcagatccggctgcctgatcttgagtggcgtgtcgccgaactccggaagcagtttgatgggaagactgtcatgctcggtgtggatgatatggacatatttaaggggattaatctgaaagttcttgcgtttgagcagatgctgaggacacacccaaaatggcagcgcaaggcagtgttggtgcagattgcaaacccaaggggtggtggtgggaaggaccttgaagagatacaggctgagattgatgagagttgcaggaggataaatgcacaattttcacggccaggatatgttcctgtggtgattatcaatagagccctttcaagtgtggagaggatggcttattataccgtggcagagtgtgtcgttgtaactgcagtgagggatgggatgaacctcacaccatatgagtatattgtctgtagacagggatttccagatttggatggttctggggatgatgggccaaggagaaagagtatgttagttgtgtccgaattcattggttgctcaccatcacttagtggagcaattcgggtaaacccttggaacattgatacaacagcagaggcaatgaacgagtcgattgctttatcagagaacgagaagcaactgcggcatgagaagcattacagatatgtcagctcacatgatgttgcctattggtccaagagctatattcatgatttggagagaagctgcagggaccattttaggaggaggtgctggggtattggactaggatttggatttagagtagttgctcttgaccgcaacttcaaaaagcttactgtggattctatcgttactgattacaagaattctaagagcagggttatactgctagactacgatggaacgctagtaccacaaactacaatcaacaggactccaaatgaaagtgttgttaaaatcatgaatgctctttgtgacgataagaagaatgttgtttttattgttagtggacgaggaagggatagccttgagaaatggttttccccttgccaggatcttggcattgctgccgaacatggctactttatgaggtggaccagagatgagcaatggcaattgaataaccagtgctcagaatttggatggatgcagatggccaagccagttatgaacctgtatacagaagcaaccgatggatcatatattgaaaccaaagagagtgctttggtctggcaccaccaagatgctgaccctggttttggatcttcacaagctaaagagatgctagatcatttggaaagtgttcttgctaatgagcctgtctgtgtaaagagtggccaacagattgtggaagtgaaaccgcagggtgtcagcaaaggatttgttgctgagaagatcctatcaacgctgacagagaacaagagacaggcagattttgttctctgcataggcgatgatagatcagacgaggatatgtttgaaggaattgctgatatcatgagaaggagcatagttgatccccaaacatcattatatgcgtgcacagtcggccagaagccaagcaaggctaagtactatttggacgatactaatgatgttttgaacatgcttgaggcgcttgcagatgcatcagaggagactgattcacaggaagatgcagaagagataacatctatcccggacccggaatag

SEQ ID NO: 405 - protein, 878 aa, Oryza sativa
MFSRSYTNLVDLANGNLSALDYGGGGGGGGGGNGAGGRPPRARRMQRTMTTPGTLAELDEERAGSVTSDVPSSLASDRLIVVANTLPVRCERRPDGRGWSFCWDEDSLLLHLRDGLPDDMEVLYVGSLRADVPSAEQDDVAQALLDRFRCVPAFLPKDVLDRFYHGFCKQTLWPLFHYMLPFTSDHGGRFDRSQWEAYVLANKLFSQRVIEVLNPEDDYIWIHDYHLLALPSFLRRRFNRLRIGFFLHSPFPSSELYRSLPVRDEILKSLLNCDLIGFHTFDYARHFLSCCSRMLGIEYQSKRGYIGLDYFGRTVGIKIMPVGINMTQLQTQIRLPDLEWRVAELRKQFDGKTVMLGVDDMDIFKGINLKVLAFEQMLRTHPKWQRKAVLVQIANPRGGGGKDLEEIQAEIDESCRRINAQFSRPGYVPVVIINRALSSVERMAYYTVAECVVVTAVRDGMNLTPYEYIVCRQGFPDLDGSGDDGPRRKSMLVVSEFIGCSPSLSGAIRVNPWNIDTTAEAMNESIALSENEKQLRHEKHYRYVSSHDVAYWSKSYIHDLERSCRDHFRRRCWGIGLGFGFRVVALDRNFKKLTVDSIVTDYKNSKSRVILLDYDGTLVPQTTINRTPNESVVKIMNALCDDKKNVVFIVSGRGRDSLEKWFSPCQDLGIAAEHGYFMRWTRDEQWQLNNQCSEFGWMQMAKPVMNLYTEATDGSYIETKESALVWHHQDADPGFGSSQAKEMLDHLESVLANEPVCVKSGQQIVEVKPQGVSKGFVAEKILSTLTENKRQADFVLCIGDDRSDEDMFEGIADIMRRSIVDPQTSLYACTVGQKPSKAKYYLDDTNDVLNMLEALADASEETDSQEDAEEITSIPDPE

SEQ ID NO: 406 - DNA, 2742 bp, Oryza sativa
atgatgtcgcggtcgtacaccaaccttctcgatctcgcggaggggaacttcgcggcgttgggcccgggaggcggcggcggcgggaggcggaggtcggggtcgttcgggctgaagcggatgtcgcgggtgatgacggtgcccgggacgctgtcggagctggacggggaggacgactcggagcacgcggcgacgaacagcgtcgcctccgacgtgccctcgtcggtggcgggggatcgagtcatagtggtctccaaccagctgcccgtcgtcgcacgccgccgtcccgacggccgcgggtggtccttctcatgggacgacgactcgctgctcctccagctccgcgacggcattcccgatgagatggaggtgttcttcgtcggttccctccgcgccgaaatccccgtcgccgaccaggaagaggtctcccaggcgctgctcgatcgcttccgatgtgctccggtgttcctccccgaccccctcaacgaacggttttaccaccgcttctgcaagcgccacctatggcctctgttccactacatgctccctttctcctcctccgcatccccgagtccctcctcctcctcctcctcctcctcctccccctcatcctcatccggcagtggccacttcgaccgcggcgcgtgggaggcctacgtgctcgcgaacaagttcttcttcgagaaggtcgtggaggtcatcaacccagaagacgactacgtatgggttcacgactaccatctcatggcgctgcccaccttccttcgccgccgcttcaaccgcctgcgcatcggcttcttcctccacagccccttcccctcgtcggagatctaccggaccctccctgttcgcgaggagatcctaaaggcgctgctcaattgtgaccttattggattccacacttttgactatgccagacatttcctctcttgttgtagtaggatgctgggaattgaataccagtcaaagcgtggatacattgggttggattactttgggcgtaccgttgggatcaaaatcatgccagtgggagttcatatgggtcaattgaagacggttctgagcttgcccgacagggaatggagggtctccgagctgcagcagcaatttgaggggaagactgtgttgctcggtgtggatgacatggatatcttcaagggtatcaacttgaagcttcttgccttcgagaatatgttgaggacacatcccaagtggcaggggcgggcagtgttggtgcaaattgctaatccggcccgtggaaagggtaaggatcttgaagccatccaggctgagattcatgagagctgcaagaggattaatggagagtttggccagtcaggatacagccctgttgtcttcattgaccgtgatgtgtcaagtgtggagaagattgcctactacacaatagcagaatgtgtggtggtgactgctgtgagggatgggatgaacttgacaccatatgaatatattgtctgtaggcaggggtctgactccacatcagaagtgaatggaccaaagaagagcatgctggtggtatcagaattcattgggtgctcaccatctctgagtggtgctatccgggttaacccatggaatatagaggcaaccgcagaggcactgaatgaggccatatcaatgtcggaacaggagaaacacctaaggcatgagaaacattaccgttatgtcagcacccacgatgttgcttattggtcgaaaagtttcatccaagatttggagagggcttgcaaggaccacttcaggaggacatgttggggcatcgggttggggtttggttttagggtggtggccttagatccccatttcacaaagcttaacatggattcaattgttatggcttatgagcggtcagagagtagggctatatttcttgattatgatggaacactggtgccacagacttccatcagtaggacacctagtgcggaagttttgaggatcatcaataccctgtgctcagataggaggaacaaagtttttcttgtcagtgggagacgcagggacaaattgggagaatggttttcctcttgtccagatctgggcattgcagcagagcatggttacttcttaaggtggactagagacgaagagtggcaaacatgtacccagacctctgacttcgggtggatggaaatggccaagccagtgatgaatctgtatacagaagcaactgatggatcttacattgatcctaaggaaagtgctttggtgtggcatcaccaggatgctgacccaggatttggatcctcccaggcaaaggagttacttgatcatctggaaagtgtattagcaaatgaacctgtttctgtcaaaagtggccagttcattgttgaagtcaaacctcagggagtaagcaagggagtagtagctgagaagatactcgtctcaatgaaggagagaggaaagcaggctgactttgtattatgcattggtgatgacaggtcggatgaggacatgtttgaaaacattgctgataccattaaaaagggtatggttgctacaaacacatcattgtttgcatgcactgtgggacaaaaaccaagcaaggccaaattttacctggatgatacgtttgaagtggtcaccatgctgagcgcactggcagatgctactgaaccagaacctgagactgatcttaccgatgagtttgatgaactggccgtgtctgtctcctcagttgatattgatgatgaacaaacgcccagtgataaactgatcggaggatag

SEQ ID NO: 407 - protein, 913 aa, Oryza sativa
MMSRSYTNLLDLAEGNFAALGPGGGGGGRRRSGSFGLKRMSRVMTVPGTLSELDGEDDSEHAATNSVASDVPSSVAGDRVIVVSNQLPVVARRRPDGRGWSFSWDDDSLLLQLRDGIPDEMEVFFVGSLRAEIPVADQEEVSQALLDRFRCAPVFLPDPLNERFYHRFCKRHLWPLFHYMLPFSSSASPSPSSSSSSSSSPSSSSGSGHFDRGAWEAYVLANKFFFEKVVEVINPEDDYVWVHDYHLMALPTFLRRRFNRLRIGFFLHSPFPSSEIYRTLPVREEILKALLNCDLIGFHTFDYARHFLSCCSRMLGIEYQSKRGYIGLDYFGRTVGIKIMPVGVHMGQLKTVLSLPDREWRVSELQQQFEGKTVLLGVDDMDIFKGINLKLLAFENMLRTHPKWQGRAVLVQIANPARGKGKDLEAIQAEIHESCKRINGEFGQSGYSPVVFIDRDVSSVEKIAYYTIAECVVVTAVRDGMNLTPYEYIVCRQGSDSTSEVNGPKKSMLVVSEFIGCSPSLSGAIRVNPWNIEATAEALNEAISMSEQEKHLRHEKHYRYVSTHDVAYWSKSFIQDLERACKDHFRRTCWGIGLGFGFRVVALDPHFTKLNMDSIVMAYERSESRAIFLDYDGTLVPQTSISRTPSAEVLRIINTLCSDRRNKVFLVSGRRRDKLGEWFSSCPDLGIAAEHGYFLRWTRDEEWQTCTQTSDFGWMEMAKPVMNLYTEATDGSYIDPKESALVWHHQDADPGFGSSQAKELLDHLESVLANEPVSVKSGQFIVEVKPQGVSKGVVAEKILVSMKERGKQADFVLCIGDDRSDEDMFENIADTIKKGMVATNTSLFACTVGQKPSKAKFYLDDTFEVVTMLSALADATEPEPETDLTDEFDELAVSVSSVDIDDEQTPSDKLIGG

SEQ ID NO: 408 - DNA, 2661 bp, Oryza sativa
atgccttcgctctcctgccacaacctcctcgacctcgttgccgcggcggacgacgcggcgccgtcgcccgcgtcgctgcgcctcccgcgcgtcatgtcggcggcgtcgccggcctcgcccacgtcgccgtccacgccggcccccgcgcggagggtggtcgtgtcgcaccgcctcccgctccgcgccgcggccgacgcggcgtcgccgttcgggttctccttcacggttgactcggacgccgtcgcgtaccagctccgctcggggctgccccccggcgcgcccgtcctccacatcggcacgctcccgccgcccgcaaccgaggcggcctccgacgagctctgcaactacttgctggcgaacttctcttgcctgccggtgtacttgcccgccgatctccaccgccgattctaccatggattctgcaagcactacctgtggcctctcctccattaccttctgccgctcacgccgtcgtcgctgggcgggttgccgttcgaccgcgcgctctaccattctttcctctcggcgaaccgggccttcgccgaccgcctcaccgaggtgctcagccccgacgacgacctcgtctggatccacgattaccacctccttgccctccccaccttcctccgcaagcgattcccgcgcgccaaggtcggtttcttcctccactcgccgttcccctcctcggagatcttccgcaccattcccgtcagggaggacctcctccgcgccctcctcaacgccgacctcgtcggcttccacaccttcgactacgcgcgccacttcctctccgcctgctcgcggctgctcggcctggattaccagtccaagcgcggctacatcggcatcgagtactatggtcgcaccgtcacggtcaagattctgcccgtcgggatcgacatgggccagctgaggtcggtggtgtcggcgccggagacgggggacctggtgcggcggctcaccgagtcgtacaaggggcggcgcctgatggtcggcgtcgacgacgtcgacctgttcaagggaatcgggctcaagttcctggcgatggagcagctgctggtggagcacccggagctgcgcggccgcgcggtgctcgtgcagatcgcgaacccggcgcgcagcgaggggcgcgacatccaggaggttcagggagaagccagggcgatcagcgcccgcgtcaatgcgcggttcggcacgccggggtacacccctatcgtgctgatcgaccgcggtgtgtcggtgcacgagaaggcggcgtactacgcggcggccgagtgctgcgtggtgagcgccgtgcgggacggcctcaaccggataccctacatctacacggtgtgccggcaggagagcactggcctggatgatgcggccaagcgcagcgtcattgtgctgtcggagttcgtcgggtgctccccgtcgctcagcggcgcaatccgggtcaacccatggagtgtggagtctatggcagaggccatgaatgcagccctgaggatgcctgagccagagcagcggctgcgacatgagaagcactacaagtatgtgagcacccatgatgttgcctactgggcgaaatctttcgaccaggacctgcagcgagcttgcaaggatcatttctcgcggcggcattggggtattgggtttgggatgagtttcaaggtggtggcacttggcccgaatttcaggcggctgtctgtcgatcacattgtgccgtcataccggaagtctgataatcgcttaattctcttggactatgatggcacagtgatgccagagggttcaattgataaggcaccgagcaatgaggtcatctctgtattgaatcgtctgtgcgaggaccccaagaacagagtgttcatcgtgagcggtagagggaaggatgaacttggcagatggtttgcaccttgtgagaagctggggattgctgcagagcatggttacttcacaaggtggagcagggactcagcttgggagacctgcgggttggccgtggactttgattggaagaagactgcagaaccagtgatgaggctttacaaggaggcaacagatggttcaaccatcgaagacaaggaaagcgcgttagtttggcaccacgatgaggcagatccagattttggttcatgccaggcaaaggaactgcttgaccacctcgaaaacgttcttgcaaatgaaccagtcgttgttaagaggggccagcatatcgtcgaagtaaatccacagggcatcagcaaaggtgtggttgtggacaacctcttgtcatccatggtgagccgagggaaggcgcccgatttcgtgctgtgcattggggacgaccggtcggacgaggacatgttcgagagcatcgtttgcccgtcgaacagcagcgtcaagctcccggcgagcagcgaggtgttcgcctgcacggtcggcaagaagccgagcatggccaagtactacctcgacgacacggtcgacgtgatcaagatgctgcagggtctcgccaatgcgccatcgcagcggccaagaccgatatggatgcccaaacgccggatagcgccagtgtcgcagaccttggtcctccttatccggctacgtctccactctcttctcttgccggcgcctgacgctgaccggaggatcgccgccgatattggcagcagcagcagcacattcctctcctga

SEQ ID NO: 409 - protein, 886 aa, Oryza sativa
MPSLSCHNLLDLVAAADDAAPSPASLRLPRVMSAASPASPTSPSTPAPARRVVVSHRLPLRAAADAASPFGFSFTVDSDAVAYQLRSGLPPGAPVLHIGTLPPPATEAASDELCNYLLANFSCLPVYLPADLHRRFYHGFCKHYLWPLLHYLLPLTPSSLGGLPFDRALYHSFLSANRAFADRLTEVLSPDDDLVWIHDYHLLALPTFLRKRFPRAKVGFFLHSPFPSSEIFRTIPVREDLLRALLNADLVGFHTFDYARHFLSACSRLLGLDYQSKRGYIGIEYYGRTVTVKILPVGIDMGQLRSVVSAPETGDLVRRLTESYKGRRLMVGVDDVDLFKGIGLKFLAMEQLLVEHPELRGRAVLVQIANPARSEGRDIQEVQGEARAISARVNARFGTPGYTPIVLIDRGVSVHEKAAYYAAAECCVVSAVRDGLNRIPYIYTVCRQESTGLDDAAKRSVIVLSEFVGCSPSLSGAIRVNPWSVESMAEAMNAALRMPEPEQRLRHEKHYKYVSTHDVAYWAKSFDQDLQRACKDHFSRRHWGIGFGMSFKVVALGPNFRRLSVDHIVPSYRKSDNRLILLDYDGTVMPEGSIDKAPSNEVISVLNRLCEDPKNRVFIVSGRGKDELGRWFAPCEKLGIAAEHGYFTRWSRDSAWETCGLAVDFDWKKTAEPVMRLYKEATDGSTIEDKESALVWHHDEADPDFGSCQAKELLDHLENVLANEPVVVKRGQHIVEVNPQGISKGVVVDNLLSSMVSRGKAPDFVLCIGDDRSDEDMFESIVCPSNSSVKLPASSEVFACTVGKKPSMAKYYLDDTVDVIKMLQGLANAPSQRPRPIWMPKRRIAPVSQTLVLLIRLRLHSLLLPAPDADRRIAADIGSSSSTFLS

SEQ ID NO: 410 - DNA, 2583 bp, Oryza sativa
atggtttctcggtcctactccaacctgctggacctggccaccggcgcggcggaccaggcgccggcgccggcggcgctcggcgcgctccggcggcggctgccgcgggtggtgaccaccgcggggctcatcgacgactccccgctgtccccctcgacgccgtccccgtcgccgcggccgcgcaccatcgtggtcgccaaccacctccctatccgggctcaccgcccggcgtcgccgtcggagccgtggaccttctcctgggacgaggactccctcctccgccacctccagcactcgtcctcctcccccgccatggagttcatctacatcggctgcctccgcgacgacatcccgctggccgaccaggacgccgtcgcgcaggcgctcctcgagtcgtacaactgcgtgccggcgttcctgccccccgacatcgccgagcgctactaccatggcttctgcaagcagcatctgtggccgctgttccactacatgctgccgctctcccccgacctcggcggccgcttcgaccgcgcgctgtggcagtcgtacgtgtcggcgaacaagatcttcgcggacaaggtgctcgaggtgatcaacccggacgacgacttcgtgtgggtgcacgactaccacctcatggtgctcccaaccttcctccgcaagcgcttcaaccgcatcaagctcggcttcttcctccactcgccgttcccctcgtcggagatctacaagacgctccccgtccgggaggagctcctgcgcgcgctgctcaactccgacctcatcggcttccacaccttcgactacgcgcgccacttcctctcctgctgcggccggatgctggggctctcctacgagtccaagcgtggccacatctgcttggagtactacggccggacggtgagcatcaagatcctcccggtgggggtgaacatggggcagctcaagacggtgctcgcgttgccggagacggaggcgaaggtggcagagctgatggcgacttactccgggaaggggagggtcgtcatgctgggcgtcgacgacatggacatcttcaaggggatcagcctcaagctgctcgccatggaggagctgctgcggcagcaccccgagtggcgcggcaagctggtgctcgtccaggtcgcgaacccggcgcgcggccgcggcaaggacgtcgacgaggtgaagggggagacgtacgccatggtgcggcggatcaacgaggcgtacggcgcgcccgggtacgagccggtggtgctcatcgacgagccgctccagttctacgagcgcgtggcgtactacgtcgtcgccgaggtgtgcctggtgaccgcggtccgcgacggcatgaacctgatcccctacgagtacatcgtgtccaggcagggcaacgaggcgctcgacaggatgctgcagccgagcaagccggaggagaagaagagcatgctggtggtgtccgagttcatcgggtgctcgccgtcgctgagcggcgcggtgagggtgaacccgtggaacatcgaggccgtggcggacgccatggagagcgcgctcgtgctgccggagaaggagaagcggatgcgccacgacaagcactaccgctacgtggacacccacgacgtgggctactgggcgaccagcttcctgcaggacctcgagaggacgtgcaaggatcacgcgcagcggcggtgctggggcatcggcttcgggctgcggttcagggtggtgtcgcttgacctcagcttcaggaagctcgccatggagcacattgtcatggcgtaccggagggcgaagacgcgcgccatcctgctcgactacgacggcacgctcatgccgcaggcgatcaacaagagcccgagcgccaattccgtcgaaacgctgaccagcttgtgcagggacaagagcaacaaggttttcctctgcagcgggttcgagaagggaacactccatgactggttcccctgcgagaaccttggcttggcggctgagcacggttacttcctgaggtcatcgagggatgcagagtgggagatttccattccccccgcggactgcagctggaagcagatcgcggagccggtgatgtgcctgtacagggagaccacggacggctcgatcatcgagaacagggagacggtgctcgtctggaactacgaggacgcagaccctgacttcggttcatgccaagccaaggagctcgtcgaccacctcgagagcgtgctcgccaacgagcccgtctcggtgaagagcaccggccattccgttgaggtcaagccacagggcgtgagcaagggcctggtggcgcggcggctgctggcgagcatgcaggagaggggcatgtgcaccgacttcgtgctgtgcatcggggacgaccgctccgacgaggaaatgttccagatgatcacaagctccacctgcggcgagtcgctggcggccacggcggaggtcttcgcctgcaccgtcggccgcaagccgagcaaggccaagtactacctcgacgacacggcggaggtcgtcaggctgatgcagggcttggcctccgtctccaacgagctggctcgggcggcgagccccccggaggacgacgacgaatga

SEQ ID NO: 411 - protein, 860 aa, Oryza sativa
MVSRSYSNLLDLATGAADQAPAPAALGALRRRLPRVVTTAGLIDDSPLSPSTPSPSPRPRTIVVANHLPIRAHRPASPSEPWTFSWDEDSLLRHLQHSSSSPAMEFIYIGCLRDDIPLADQDAVAQALLESYNCVPAFLPPDIAERYYHGFCKQHLWPLFHYMLPLSPDLGGRFDRALWQSYVSANKIFADKVLEVINPDDDFVWVHDYHLMVLPTFLRKRFNRIKLGFFLHSPFPSSEIYKTLPVREELLRALLNSDLIGFHTFDYARHFLSCCGRMLGLSYESKRGHICLEYYGRTVSIKILPVGVNMGQLKTVLALPETEAKVAELMATYSGKGRVVMLGVDDMDIFKGISLKLLAMEELLRQHPEWRGKLVLVQVANPARGRGKDVDEVKGETYAMVRRINEAYGAPGYEPVVLIDEPLQFYERVAYYVVAEVCLVTAVRDGMNLIPYEYIVSRQGNEALDRMLQPSKPEEKKSMLVVSEFIGCSPSLSGAVRVNPWNIEAVADAMESALVLPEKEKRMRHDKHYRYVDTHDVGYWATSFLQDLERTCKDHAQRRCWGIGFGLRFRVVSLDLSFRKLAMEHIVMAYRRAKTRAILLDYDGTLMPQAINKSPSANSVETLTSLCRDKSNKVFLCSGFEKGTLHDWFPCENLGLAAEHGYFLRSSRDAEWEISIPPADCSWKQIAEPVMCLYRETTDGSIIENRETVLVWNYEDADPDFGSCQAKELVDHLESVLANEPVSVKSTGHSVEVKPQGVSKGLVARRLLASMQERGMCTDFVLCIGDDRSDEEMFQMITSSTCGESLAATAEVFACTVGRKPSKAKYYLDDTAEVVRLMQGLASVSNELARAASPPEDDDE

SEQ ID NO: 412 - DNA, 2700 bp, Oryza sativa
atgatgtcgaggtcgtacacgaacctgctggacctcgcggcggggaacttcgaggcgctggggccggcggggggagggaggaggaggtcgttcggggcgaagcggatgacgcgggtgatgacggtgcccgggacgctgtcggagctggacgacgaggacgacgagccggcggcgacgagcagcgtcgcctccgacgtgccctcgtcggcggcgtgcgagcgcctcatcgtcgtggcgaaccagctccccgtggtggcgcggcggaggccgggcgccgcggcgggggggtgggcgttctcgtgggacgacgactcgctcctcctccgcctccgcgacggcgtccccgacgagatggaggtgctcttcatcggcacgctccgcgccgacgtgcccgcctgcgagcaggacgaggtgtcgcagagcctcatcgatggattcggatgcgcacccgtgttcctccccgcggggctctacgaccgattctaccagcacttctgcaagggttacctatggccgctgttccactacatgctccccttcgcctccgccttgccggcggccgcatccggcgatggccggtttgaccgcggcgcgtgggaggcctacgtgctcgccaacaaatacttcttcgagaaggtggtcgaggtcatcaacccggaggacgactacgtttgggtccacgattaccacctcatggcgctgcccaccttcctccgccgccgcttcaatcgcctccgcatcgggttcttcctccacagcccctttccctcatcggagatctaccgctcgctgcccgtccgagaggagatcctaagaacgctgcttaattgcgatctcattggattccacacattcgattatgcgaggcacttcctatcttgctgtagtaggatgctggggatagagtaccagtcaaagcgtggatacattggattggattactttggccgcactgttggaatcaagatcatgccagtgggaatccatatgggtcaattgcaatcagtgttgcgattgtccgagaaagaaaagaaggttgctgagctgcggcagcaattcgagggcaagtccgtgttacttggtgtggatgatatggatatcttcaagggaatcaacttaaaacttcttgcgtttgagaatatgctgaggacgcatcccaagtggaagggaagagctgtgttggtgcagattgcaaacccagcacgagggaagggaaaggatctggaggctgtccaggctgagattcgggagagttgtgatagaattaacaaggagtttggccagtcaggttacagtccagtgattttcattgaccagagcgtgccaagtgcggtgaggcttgcatattatacggttgctgagtgtgttgtggtgacggctgtgagggatgggatgaatttgaccccatatgaatacattgtctgccgggaggggatacctggctctgagtgtgcaccagaggtgagtggaccaaagaagagcatgttggttgtgtcggagtttattggttgctcaccttcactgagtggagccattcgtgttaacccgtggaatatcgaggcaactgcagaggcactgaatgaggccatctcaatgtcagagcgtgaaaagcagctgaggcacgaaaaacattaccgttatgtcagcacccatgatgttgcatattggtctaagagctttgtacaggacctggagagggcttgcaaggatcactttaggaaaccatgctggggcattggattgggatttggcttcagggtggtagccctagacccacatttcacaaagcttaatttcgattcaattataatgtcctatgagagatcaaagagtagggctatatttctcgactatgatggcacattggtgccacaggcttcgctcaacaagaatccaagtgaagaattactgaggatcattaataccctatgcgcagatagaaataacaccgtgttcattgtcagcgggagaagcaaggatgacttgagcaaaaagcttatctcatgtccaaagctaggcattgccgcagagcatggctacttcttaaggtggactagagatgaagaatggcaaaccactgcacagacctcagattttggatggatgcaaatggcgaagccagtgatggatctttatactgaatcaactgacggatccaccattgagactaaagaaactgcactggtgtggcaccatcaggatgctgaccaaggttttggctcttcccaggcaaaggaaatgcttgatcacttggaaagtgtattagcaaatgaaccagtctcagtcaagagtggccaattcattgttgaagtcaaacctcagggtgttaccaaagggctcatagctgagaaagtactcacatcaatgaaggagaaggggcaactggcagattttgtattatgcattggtgatgacaggtcagatgaggatatgtttgaaaatattgccgatgtcatgaaaaggagcattgttgcaccaaaaactccactgtttgcatgtactgtgggccagaagccaagcaaagctaggttttacctggatgatacatttgaagtcgtcaccatgttgagttcactggcggatgcttcagaaccagaccttatggcagacttggaagatgacttggccacatcagtctcatcaatagaaataagtgacagagtggtatcttttagtaatttaaggacagaaggatcttag

SEQ ID NO: 413 - protein, 899 aa, Oryza sativa
MMSRSYTNLLDLAAGNFEALGPAGGGRRRSFGAKRMTRVMTVPGTLSELDDEDDEPAATSSVASDVPSSAACERLIVVANQLPVVARRRPGAAAGGWAFSWDDDSLLLRLRDGVPDEMEVLFIGTLRADVPACEQDEVSQSLIDGFGCAPVFLPAGLYDRFYQHFCKGYLWPLFHYMLPFASALPAAASGDGRFDRGAWEAYVLANKYFFEKVVEVINPEDDYVWVHDYHLMALPTFLRRRFNRLRIGFFLHSPFPSSEIYRSLPVREEILRTLLNCDLIGFHTFDYARHFLSCCSRMLGIEYQSKRGYIGLDYFGRTVGIKIMPVGIHMGQLQSVLRLSEKEKKVAELRQQFEGKSVLLGVDDMDIFKGINLKLLAFENMLRTHPKWKGRAVLVQIANPARGKGKDLEAVQAEIRESCDRINKEFGQSGYSPVIFIDQSVPSAVRLAYYTVAECVVVTAVRDGMNLTPYEYIVCREGIPGSECAPEVSGPKKSMLVVSEFIGCSPSLSGAIRVNPWNIEATAEALNEAISMSEREKQLRHEKHYRYVSTHDVAYWSKSFVQDLERACKDHFRKPCWGIGLGFGFRVVALDPHFTKLNFDSIIMSYERSKSRAIFLDYDGTLVPQASLNKNPSEELLRIINTLCADRNNTVFIVSGRSKDDLSKKLISCPKLGIAAEHGYFLRWTRDEEWQTTAQTSDFGWMQMAKPVMDLYTESTDGSTIETKETALVWHHQDADQGFGSSQAKEMLDHLESVLANEPVSVKSGQFIVEVKPQGVTKGLIAEKVLTSMKEKGQLADFVLCIGDDRSDEDMFENIADVMKRSIVAPKTPLFACTVGQKPSKARFYLDDTFEVVTMLSSLADASEPDLMADLEDDLATSVSSIEISDRVVSFSNLRTEGS

SEQ ID NO: 414 - DNA, 2475 bp, Oryza sativa
atgccctccctccccaactccggcgacgagggcggcgccccgcctccgactccgccgccgccgggggcgcgccgcgtggtggtcgcccaccgcctccccctccgcgcggatcccaatccgggcgcgccgcacgggttcgacttctccctcgacccgcacgcgctcccgctccagctctcccatggcgtcccccgccccgtcgtcttcgtcggcgtgctcccctccgccgtcgccgaggccgtccaggcgtccgacgagctcgcggccgatctcctcgcgcggttctcatgctacctggtgttcctccccgccaagctccacgccgacttctacgacggcttctgcaagcactacatgtggccgcatctccactatctcctcccgctcgcgccctcctacggcaggggcggcggcctccccttcaacggcgacctctaccgcgccttcctcaccgtcaacacccacttcgccgagcgcgtgttcgagctcctcaaccccgacgaggacctggtgttcgtccacgactaccacctctgggcgttccccaccttcctccgccacaaatccccgcgcgcccgcataggtttcttcctccactctcccttcccctcctccgagctcttccgcgccatccccgtccgcgaggacctcctccgcgccctcctcaacgccgatctcgtgggcttccacaccttcgattacgcgcgccacttcctctccgcgtgctccagggtcctcggcctctccaaccgctcgcgccgcggctacatcgggatcgagtacttcggccgcacggtggtcgtcaagatcctctccgtcggcatcgacatgggccagctccgcgcggttctgccgttgccggagacggtcgccaaggccaacgagattgctgacaagtacaggggacgacagctgatgctcggcgtggacgacatggatttgttcaaggggattgggctcaagctcttggccatggagaggctgctggagtcgcgggcggacttgcgtggccaggtggtcctcgtgcagatcaacaacccggcgcggagccttggccgcgacgtcgacgaggtccgcgcggaggtgctggcgatccgtgaccggatcaatgcccggttcggctgggcggggtacgagccggtggttgtgatcgacggcgccatgccgatgcacgacaaggtggcgttctacacgtccgcggacatctgcatcgtgaatgccgtgcgcgacgggctgaacaggataccgtacttctacaccgtgtgccggcaggagggcccggttcccaccgctcctgccgggaagccgaggcagagcgccatcatcgtgtcagagtttgtcgggtgctcgccgtcgctgagcggcgcgatccgcgtcaacccctggaacgtggacgacgtcgcggacgccatgaacacggcgctgaggatgagcgacggcgagaagcagctgcgccaggagaagcactacaggtacgtgagcacgcacgacgtcgtctactgggcgcagtcgttcgaccaggacctgcagaaggcctgcaaggacaactcgtccatggtgatcctcaacttcggcctcggcatgggcttccgcgtcgtcgcgctcggccccagcttcaagaaactctcacccgagctcattgaccaagcataccgccagactggcaacaggctcatcttactggactacgatggcacagtgatgccacaggggctgatcaacaaggcgcccagtgaggaagtgatccgtactctgaatgaactgtgctctgatccgatgaacaccgttttcgtcgtcagcgggcggggcaaggatgaactggctgaatggtttgcaccatgcgacgagaagctggggatctctgcagagcacggctacttcacaaggtggagcagggattctccctgggagtcatgcaagttggtgacacattttaattggaagaacatcgcagggcctgtaatgaagcactacagtgatgcaaccgatgggtcatacatcgaggttaaagaaacatcactagtgtggcactatgaggaagccgatccggattttggatcatgccaggccaaagagctccaggaccacctgcagaatgtgcttgcgaacgagccagtctttgtgaagagcggccatcagattgtggaagttaatcctcagggtgtgggcaaaggagtcgccgtgcgtaatctcatttcaaccatgggaaatcgtggcagcttgccagatttcatcctctgcgtcggcgatgaccggtcggatgaagacatgttcgaggctatgatcagcccttcgcctgcgttcccggagactgcacagatcttcccctgcactgttggcaacaagccgagcttggccaagtactacctggatgacccggctgatgttgtgaagatgctccagggcctgacggactcgccgacccagcagcaaccgcggccccccgtctcgttcgaaaactcgctagatgattga

SEQ ID NO: 415 - protein, 824 aa, Oryza sativa
MPSLPNSGDEGGAPPPTPPPPGARRVVVAHRLPLRADPNPGAPHGFDFSLDPHALPLQLSHGVPRPVVFVGVLPSAVAEAVQASDELAADLLARFSCYLVFLPAKLHADFYDGFCKHYMWPHLHYLLPLAPSYGRGGGLPFNGDLYRAFLTVNTHFAERVFELLNPDEDLVFVHDYHLWAFPTFLRHKSPRARIGFFLHSPFPSSELFRAIPVREDLLRALLNADLVGFHTFDYARHFLSACSRVLGLSNRSRRGYIGIEYFGRTVVVKILSVGIDMGQLRAVLPLPETVAKANEIADKYRGRQLMLGVDDMDLFKGIGLKLLAMERLLESRADLRGQVVLVQINNPARSLGRDVDEVRAEVLAIRDRINARFGWAGYEPVVVIDGAMPMHDKVAFYTSADICIVNAVRDGLNRIPYFYTVCRQEGPVPTAPAGKPRQSAIIVSEFVGCSPSLSGAIRVNPWNVDDVADAMNTALRMSDGEKQLRQEKHYRYVSTHDVVYWAQSFDQDLQKACKDNSSMVILNFGLGMGFRVVALGPSFKKLSPELIDQAYRQTGNRLILLDYDGTVMPQGLINKAPSEEVIRTLNELCSDPMNTVFVVSGRGKDELAEWFAPCDEKLGISAEHGYFTRWSRDSPWESCKLVTHFNWKNIAGPVMKHYSDATDGSYIEVKETSLVWHYEEADPDFGSCQAKELQDHLQNVLANEPVFVKSGHQIVEVNPQGVGKGVAVRNLISTMGNRGSLPDFILCVGDDRSDEDMFEAMISPSPAFPETAQIFPCTVGNKPSLAKYYLDDPADVVKMLQGLTDSPTQQQPRPPVSFENSLDD

SEQ ID NO: 416 - DNA, 2592 bp, Oryza sativa
atggtttcaaagtcatatacaaatcttctagatatgagtggtgaagatgtgtttgactttcagcaaccatttagatcgcttcctcgttttgtgacttccccaagcatcacatctaatcctgattgggatacaagtaatgctgatgattcagttggtcctgcatcttgctgtgtaaggaaaataatcgtctccaactttcttccactaaactgtaccaaagatgaagctactggacagtggtccttctcaatggatgacaatcaacttcttgttcaacttaaagatggatttccaatggagagcgaagttgtttatgtgggtagcttgaacgctgaagttgatcctggtgagcaagatcaactttcacagaaacttttcagagaatacaaatgcatacctactttcctcccagctgacctccagcagcagttctatcatggattctgtaaacaacaattatggccacttttccattatatgcttcctatttgcctcgacaaaggcgagctctttgaccgctctctatttcaagcctatgttcgggcaaacaaaatatttggtgacaaagttatggaggccatcaattcagatgatgactgtgtgtgggttcatgattatcacctcatgcttctcccaacctttttaagaaaaaagcttcatcgcatcaaaattggtttcttccttcacagtccatttccctcctctgaaatctataggacactgccagtaagagatgaaattttgaagtctcttctgaatgctgatctcattggctttcaaacatttgactatgcccgccacttcctttcatgttgcagcagattgttaggccttaattacgagtcaaaacgtggtcacatcggtatagagtactttggccgtacggtgagcctcaagatccttgctgtgggtgtacatgttggtcgtcttgagtctgtgttgaggctgcctgccacaattagcaaggttcaagaaattgagcaaagatataagggtaagatggtgatgttgggtgtagatgatatggatatcttcaaagggatcagtctaaaattgcttggcttggaatttcttttggagagaactccaaagctaagagggaaggttgtccttgtgcagattataaatcctgcaagaagcactggaaaagatgtggaggaagcaataaatgaagccgtctctgtagctgaaaggataaacattaagtatggttctgctgagtacaagcctgtcatccttatcgactaccccataccttcttatgagaagattgcatactatgctgcatctgattgctgtattgtaaatgctgtgagggatgggatgaacttgataccatatgagtatactgtctgcaggcagggaaatgaggagattgataagctcagaggtgttgataagagctcacatcacacaagcacactaattgtgtctgagtttgttggttgctccccatcacttagtggtgctttcagggtaaatccttggagtattgaagatgtagctgatgcattatataaagcaatggatttgactcaatcggagaggaaattgcgtcatgataagcattatcgctacgtcaaaactcatgacgttgcttactgggcgcgcagtttttcccaagatctagatagagcgtgcaaggatcactatagccgaaggtgttggaccactgggtttggtttgaattttagagtcattgctctttctcctggatttagaaggctatctttggaacactttgcttcttcttataagaagactaatagaaggctgatatttatggattatgatggcacccttgtcccccagtcatcagtcaacaaagttccaagtgcagaagtcatttctatccttacaagcttgtgcaatgatccaaagaactgtgtgttcatagtcagcggaagagatcgtactaccctaagtgagtggtttgcttcatgtgataagcttggtattgcagctgaacatggctattttatcaggtggaacaaagaaggtgaatgggaaacaagctcctcagctcaagattgtgaatggaagaacatcgccgagcctatcatggaagtatacaaggaaacaaccgatgggtctgccatagagacaaaggagagtgggctagtttggcattatcaggatgcagatcatgacttcggttcatgccaggcgaaggagctagtgagtcatcttgagagggtgctggcaaatgaacctgttgtggttaaacgtggtcatcaaatcgtagaagttaagccccagggtgttagcaaggggattgctgtggacacagtcattcggacggtaatcaacaacgaaaacgcaccggattttctgatgtgcattggtaacgatcgatcggacgaggacatgtttgagagcatcaatgaagccgtctcacgttctgtgtttcctactgctccagatgtctttgcctgctctgttggccagaaggctagcaaagcgaagtactatgtggatgggtgcagtgaggtgatcagattactcaagggtgtaaccgccattacaccccgaagggaggtgatcagccagagtcaagtaacattcagggatatacttgaggttgtcagctga

SEQ ID NO: 417 - protein, 863 aa, Oryza sativa
MVSKSYTNLLDMSGEDVFDFQQPFRSLPRFVTSPSITSNPDWDTSNADDSVGPASCCVRKIIVSNFLPLNCTKDEATGQWSFSMDDNQLLVQLKDGFPMESEVVYVGSLNAEVDPGEQDQLSQKLFREYKCIPTFLPADLQQQFYHGFCKQQLWPLFHYMLPICLDKGELFDRSLFQAYVRANKIFGDKVMEAINSDDDCVWVHDYHLMLLPTFLRKKLHRIKIGFFLHSPFPSSEIYRTLPVRDEILKSLLNADLIGFQTFDYARHFLSCCSRLLGLNYESKRGHIGIEYFGRTVSLKILAVGVHVGRLESVLRLPATISKVQEIEQRYKGKMVMLGVDDMDIFKGISLKLLGLEFLLERTPKLRGKVVLVQIINPARSTGKDVEEAINEAVSVAERINIKYGSAEYKPVILIDYPIPSYEKIAYYAASDCCIVNAVRDGMNLIPYEYTVCRQGNEEIDKLRGVDKSSHHTSTLIVSEFVGCSPSLSGAFRVNPWSIEDVADALYKAMDLTQSERKLRHDKHYRYVKTHDVAYWARSFSQDLDRACKDHYSRRCWTTGFGLNFRVIALSPGFRRLSLEHFASSYKKTNRRLIFMDYDGTLVPQSSVNKVPSAEVISILTSLCNDPKNCVFIVSGRDRTTLSEWFASCDKLGIAAEHGYFIRWNKEGEWETSSSAQDCEWKNIAEPIMEVYKETTDGSAIETKESGLVWHYQDADHDFGSCQAKELVSHLERVLANEPVVVKRGHQIVEVKPQGVSKGIAVDTVIRTVINNENAPDFLMCIGNDRSDEDMFESINEAVSRSVFPTAPDVFACSVGQKASKAKYYVDGCSEVIRLLKGVTAITPRREVISQSQVTFRDILEVVS

SEQ ID NO: 418 - DNA, 2658 bp, Oryza sativa
atggtttcgagatcctactccaacttgctggagctcgccgccggcggaggaggaggaggcggcggcgaagggccgctgccgtcgctggggcggcgacggattccgcgggtggtgacggcgtcgggcattgtcccggacctggactactccgacgacgacgcggcgtcggcggcgtcgtcgtccgaccactcctccgcccactcccacgcgccgcgcgagcgcgccatcatcgtcgccaaccagctgcccatccgcgcgtctcgccgcggcggcggcggcggcgggtgggagttctcctgggacgaggacagcctcctcctgcagctcagggacagcctccgcgcccacgccgaccgcgccgacgacatggagttcgtctacgtcggcggcctccgcgacgacgtgcccgcggcggagcacgacgaggtggcgcaccacctcctcgagggcttccgctgcgtgcccaccttcctccccgccgacctccggtcgcggttctaccacggattctgcaagcagcagctgtggccactgttccattacatgctcccgctgtcgccggagctcggcggccgcttcgaccgcgcgctgtggcaggcgtacgtgtccgtcaacaagatcttcgccgacaagatactggaggtgatcagccccgacgaggactacgtctgggtgcacgactaccatctcatgatcttgccgacgttcctgcggaagcggttcaaccgcgtcaagctcggcttcttcctccacagcccgttcccgtcgtcggagatctacaagaccctgcccgtccgcgaggagctgctccggtcgctcctgaacgccgatttgatcgggttccacaccttcgattatgccaggcatttcctgtcctgctgtggaaggatgctcgggttgaagtatgagtcgcagaggggctacattgcgctggagtattatggtcggacggttaccatcaagatattgccggtgggagttcatttggagcagctgcggtcggtgctcaatcttccggagacgggggtcaaggtggccgagcttctcaagcaattctgcgatcagaaccggctgatgttgcttggcgtagatgatatggacatctttaaaggaattagcttgaagcttttggcatttgagcagctcctgatgcaacatcccgaatggcgaggaagggtggttctagtacagattgccaatccagcgaggggacgggggaaagatgtgaaagaggtgcaggatgagagctatgcaatggtgaggcgtatcaatgaggcatttgggcagccaggttaccagccggttatattgatcgatcggccacttcagttctatgagagaatggcttactatgttgtcgctgagtgctgcctggtgaccgcagtgagagatggcatgaatcttatcccgtatgagtatgtaattgctaggcagggcaatgaaaaactagacgggatcttaggtcttggcccatcggcacggaagaagagcatgcttgttgtgtcagagttcatcggctgttcaccttccctaagtggtgcgattcgggtaaacccttggaacatcgatgctgtggctgatgcaatggactctgctttagagatgcctgaaggggagaaggtgctgagacatgagaagcaccacaaatatgtgagcacacatgatgttggatactgggcaaacagcttcttgcaagatctggagaggacttgtctggaccatagcaggaggcgttgttgggggataggattcgggctaaggtttagggttgtagcccttgatccaaacttcaagaagcttgcagttgagcaccttgtctcagcctaccggaggacgaccacgcgaatcattcttttggactatgacgggacgctgatgcctcaaacatcatttggtaagagcccaagctctaaaacgatagatatgctgaacagcctgtcccgtgatcagaacaacatggtcttccttgtgagcacaaagaagcggtcgactctagaagaatggttctcatcatgcgacaacctaggcttagctgctgagcatggatactttctcaggctgaagagagatgcagaatgggagacgtgtgtcccagtgacagacagaagctggaagcaaatcgcagagcctgtgatgaaaacatacaccgagacaacagatgggtcaacaattgaggacaaggagaccgcgatagtgtggagctacgaggatgctgatcctgattttggatcttgccaagccaaggagctccatgaccatctggagagtgtccttgcaaatgagccagttacagtaaaagctggcctgaaccatgtcgaggtgaagccacagggtgtaagcaagggccttgtggcaaaacggcttttgtcgataatacgggagaacagcctccttccggactttgtcctctgcatcggtgatgaccgctccgatgaagacatgttcgaggtgatcaccactgcagcacaggacaactgcctaagcccagacgccgaggtcttcgcctgcaccgttggtcgcaagcccagcaaggccaagtactacctggatgacctggccgacattgtgaggctgatccagggcctcgccaatgtctctgacgagatgcacagcacaatgcccacacctgtcgacgccgcagacaccgccctgaggtga

SEQ ID NO: 419 - protein, 885 aa, Oryza sativa
MVSRSYSNLLELAAGGGGGGGGEGPLPSLGRRRIPRVVTASGIVPDLDYSDDDAASAASSSDHSSAHSHAPRERAIIVANQLPIRASRRGGGGGGWEFSWDEDSLLLQLRDSLRAHADRADDMEFVYVGGLRDDVPAAEHDEVAHHLLEGFRCVPTFLPADLRSRFYHGFCKQQLWPLFHYMLPLSPELGGRFDRALWQAYVSVNKIFADKILEVISPDEDYVWVHDYHLMILPTFLRKRFNRVKLGFFLHSPFPSSEIYKTLPVREELLRSLLNADLIGFHTFDYARHFLSCCGRMLGLKYESQRGYIALEYYGRTVTIKILPVGVHLEQLRSVLNLPETGVKVAELLKQFCDQNRLMLLGVDDMDIFKGISLKLLAFEQLLMQHPEWRGRVVLVQIANPARGRGKDVKEVQDESYAMVRRINEAFGQPGYQPVILIDRPLQFYERMAYYVVAECCLVTAVRDGMNLIPYEYVIARQGNEKLDGILGLGPSARKKSMLVVSEFIGCSPSLSGAIRVNPWNIDAVADAMDSALEMPEGEKVLRHEKHHKYVSTHDVGYWANSFLQDLERTCLDHSRRRCWGIGFGLRFRVVALDPNFKKLAVEHLVSAYRRTTTRIILLDYDGTLMPQTSFGKSPSSKTIDMLNSLSRDQNNMVFLVSTKKRSTLEEWFSSCDNLGLAAEHGYFLRLKRDAEWETCVPVTDRSWKQIAEPVMKTYTETTDGSTIEDKETAIVWSYEDADPDFGSCQAKELHDHLESVLANEPVTVKAGLNHVEVKPQGVSKGLVAKRLLSIIRENSLLPDFVLCIGDDRSDEDMFEVITTAAQDNCLSPDAEVFACTVGRKPSKAKYYLDDLADIVRLIQGLANVSDEMHSTMPTPVDAADTALR

SEQ ID NO: 420 - DNA, 2427 bp, Physcomitrella patens
atgtcggaggggagtcgaatgcttgtcgttgcgcgcatgttgccattgaacgctgtgccccatccgaatgggaatagctacttattcgagtgggacaaagactcgttgctttggcagcttagagatggattgcggcctggaatggaggttatctatgtaggctgtttgaaggtggaggtggaagacgctgatcaggacgagattgcggccatgctcctggaaaattttaattgcgttcctgcttttctacccaacgaactgaaaagtaggttttatcatgggttttgcaagcagatgttgtggccccttttccactatctgttacctctcagtcctgagcatgggggtcgattcaaacgctcatggtggcaagcatatgtgtccgtcaacaagatttttgccgacaaggtgatggaggtgattagtcccgacgatgactatgtgtgggtgcatgactaccatctcatggttttgcccacttttttgcgtaagcgattcaataaagtgaggctcggtttctttttgcacagcccgtttccttcgtccgagatttacaggacgctgccggtgcgtgacgagatacttagagctctattaaatgcagacttgatagggtttcatacatttgattatgcgaggcactttttatcatgttgcagccgtatgttaggtctggagtacgcatctaagcgggggcacattgggttagaatattatggccgcaccgtgggcatcaaaattatgcccgtcggtatccacatgggtcagttcgatgcaagcttgaagcttgctgatacaaagtggcgtattggtgagatcagggaaaagtacaagggaatgtcggttcttcttggggtagatgacatggacattttcaagggcattgggctgaagttcttggctatggaggagcttctcaggcaacacccacagtggcaagggaaggttgtcatgatacaaattgctaatcctgcgaggggtagtggcaaagatattgacgaagctcgtgaagaggcctatactatagccaaaaaagtgaatgaagagtttgggaatgagcgttataccccgattgtcttggaggagaggcacgtgcccctgtttgagcgaattgcgtattacaccatcgcagagtgctgtgttgtgacggcagtgcgtgatgggctcaatctcatcccgtacgagtacatcgtatgtagggaaggagctcctcagatgtcagaatcggaaaattatcttgaagaatcatctgtcaagaaaagcatgttgatagtgtctgagttcatcggatgctcgccatctctgagtggtgccattcgggttaatccctggaacattgagatggttgcagaggctatgaatagtgcgatcacgatgaaagagcaagagcaacacctgcgccatgagaagcattacaggtatgttagtacgcatgatgttgcgtactgggccaaaacctacacgtcggatttggaaagaacttgccgcgatcacaataaacgccggtgctatgggattgggttcggattaggtttccggatcgtagctctggatccgagctttaagaagttgcgcaccgaacttattgtcggagcatacgggaagagtgccaccagagccttacttttggattatgatggtacagtgatgcctacatcacacgaagagagtcctagtcccgaggttttggatcttttaaatacgctttgcaacgacccaaagaacacacttttcatcgtaagtgggcgtccacggaataagcttggggaatggtttagttcctgcgagttacttggtcttgctgctgaacatggatacttttacaggtacaaatgggatcggttgagtgttgttgagcgtgaagcgccgtccacgagctttgattggaaactgattgcagggccagtcatgcaactttacaccgagtcaacagatggctcctatattgaggccaaagaaagtgcattggtgtggcattatcgagatgcagaccatgactttggagcttggcaggctaaagagttgcaagatcaccttgaaagtgtactagccaatgagccagtcacggtgaagagtggtgcgcaaattgtggaagttacacctcagggggtgagtaagggaattatggtggagaagttgctattaatgatggagaagaagaatggagccttgccagacatggtactgtgtgtgggtgacgatcggtcagatgaggacatgtttgagagcattgaatccctcatgcgtggcgcccccagtgccgaggtatttgcatgcactgtgggtcagaaacccagtaaagccaagtactatttggatgatgttggggaggtaatcaagatgctacaggggttggcaaatgcctctattaggtcctctgcttcatcacttcctcagctttctgatttctcatctcttcatatttag

SEQ ID NO: 421 - protein, 808 aa, Physcomitrella patens
MSEGSRMLVVARMLPLNAVPHPNGNSYLFEWDKDSLLWQLRDGLRPGMEVIYVGCLKVEVEDADQDEIAAMLLENFNCVPAFLPNELKSRFYHGFCKQMLWPLFHYLLPLSPEHGGRFKRSWWQAYVSVNKIFADKVMEVISPDDDYVWVHDYHLMVLPTFLRKRFNKVRLGFFLHSPFPSSEIYRTLPVRDEILRALLNADLIGFHTFDYARHFLSCCSRMLGLEYASKRGHIGLEYYGRTVGIKIMPVGIHMGQFDASLKLADTKWRIGEIREKYKGMSVLLGVDDMDIFKGIGLKFLAMEELLRQHPQWQGKVVMIQIANPARGSGKDIDEAREEAYTIAKKVNEEFGNERYTPIVLEERHVPLFERIAYYTIAECCVVTAVRDGLNLIPYEYIVCREGAPQMSESENYLEESSVKKSMLIVSEFIGCSPSLSGAIRVNPWNIEMVAEAMNSAITMKEQEQHLRHEKHYRYVSTHDVAYWAKTYTSDLERTCRDHNKRRCYGIGFGLGFRIVALDPSFKKLRTELIVGAYGKSATRALLLDYDGTVMPTSHEESPSPEVLDLLNTLCNDPKNTLFIVSGRPRNKLGEWFSSCELLGLAAEHGYFYRYKWDRLSVVEREAPSTSFDWKLIAGPVMQLYTESTDGSYIEAKESALVWHYRDADHDFGAWQAKELQDHLESVLANEPVTVKSGAQIVEVTPQGVSKGIMVEKLLLMMEKKNGALPDMVLCVGDDRSDEDMFESIESLMRGAPSAEVFACTVGQKPSKAKYYLDDVGEVIKMLQGLANASIRSSASSLPQLSDFSSLHI

SEQ ID NO: 422 - DNA, 2565 bp, Populus tremuloides
atgataacacagtcttgcaaggacaatttggatatgatttcggtcaacgattttcgtgtcgtggaccgaatccctcgtatcatgaatgtgctgggagctctctctgaaatcgaggttggtgagcatgatgatgaaggcgtaaccagtcctgtcgtgtccaagccgcgccgaatcatggtggccaatcagctaccgataagagggcaccgtaatgaagaaacaaaaggttggtcttttgaacttgataaagagagtcttgttttgcagtttaaagatggatttcctgcaaattcagaagtttggtacgtggggttgttgaaggttgatgttgaaacgaaagatcaggatgaggttgcgcggttgttgttttctatgtttagatgtgttcctgttttcttgactgatgatcagaagaacaagtattatcatggcttctgtaagcactatttatggcctttgtttcattatatgttgcctttgtctcctagtcgtggtggtgtacgttttgataggtcgctttgggaggggtatatagtagctaataggttatttgcaaacaaggttactgagattttgaggcatcatgaggattctgtttgggtgcatgattatcatcttatggtgctgcctgctttcttgaggaagaggtttaacagagttaaacttggcttcttcttgcatagtccgttcccatcatctgagatatacacgactatacctgtcagggaggagattttgaggtctcttttgaattgtgatcttatcgggtttcatacttttgattatgctaggcatttcttgtcttgttgtagcaagatgttgggtattgattatcagtgcaaaaggggttacattggcctggattactgtggtaagactatcagtatcaagatcttacatatgggaattcatatgggacagcttgagtcggttttgaatatggagcagacagccactttggccaaacaattgaaggagaaatttgaagggaaaattgtaatggttggtgtggatgatttggatttgcttaaaggtattagctcgaagttctcagcgatggggagacttttggaaatgcgtccggaactgatagggaaagtggtattagtccagattgctaatccggctaggagtcagggtaaggatgtgcaagaagtccaaaaagagactactcttattgctcaacagatcaatcaaaagtatggttacgaaggttatcagccaattgttttcattaatggtccagttagcactctagagaaagcagcatactatgcgatatctgaatgttgtgtggttaatgctttaagggatgggatgaatttggtttcatacaaatacactgtttgtaggcaaggcagccctgttttagacaaggcattggggattgatgaatcgtatccaaggaaaagtttcctaattgtgtcagaattcattggatgctcaccgtctctcagtggggcacgtcgtgttaatccttgggacgtaggtgctgtggccgatgccatgtatgcgggtatccatatgaaggatgaagagaaacatttgcgccacgagaagcactataagtacattagctctcacgatgttgctttttgggcgaggagttttgatctggaccttgagagggcttgcaaagatcattatctcaagaggtattacaatgttgggtttggtttgaatttcagagttgctgctgtgggaacaaattttaggatgctcacgactgaaagagttgttgctgcctataacaatacaaacagccgcttaatccttttagactatgatggcactatgatgccacagtgtgctgttgacaaaacacccagaagtgaagttatttcaatcctgaattgcttatgcagtgatcccaaaaacgttgttttcattgtgagtggcagaggaagggatcctctaagcaagtggttctccccatgtgagacattgggtatatcagccgagcatggttactttaccaggtggacaaagaattctccatgggagacttgctcggtggcaatggattgtgattggaaaaagatcgtacaacctgtcatggagcgttatacagagacaaccgatgggtctttcatagagccaaaagaaagcgcactagtgtggcaccatcaagacgcagaccctgatttcggcagctgccaggctaaagagcttcttgatcacttggagagtgtccttgctaacgagcctgtggtggttagaagaggccagcagattgttgaggtgaaaccacagggagtaagcaaaggtatagttgtagaaaaccttatttcaaccatgcgaagtcagggcaagtcaccggatttcctgttctgcatcggggatgataggtccgatgaggacatgtttgagagcattgcaagacttgttgacaatccatcaataccacccattgcagaagtgtttgcctgcactgttggtcttaagccaagcaaggctaaatactatcttgatgatacgcctgaggtcatcaagttgcttcaaggccttgctacagcatcagtagggtcaaagtatgcacatactcttgaagatgaagatgtctaa

SEQ ID NO: 423 - protein, 854 aa, Populus tremuloides
MITQSCKDNLDMISVNDFRVVDRIPRIMNVLGALSEIEVGEHDDEGVTSPVVSKPRRIMVANQLPIRGHRNEETKGWSFELDKESLVLQFKDGFPANSEVWYVGLLKVDVETKDQDEVARLLFSMFRCVPVFLTDDQKNKYYHGFCKHYLWPLFHYMLPLSPSRGGVRFDRSLWEGYIVANRLFANKVTEILRHHEDSVWVHDYHLMVLPAFLRKRFNRVKLGFFLHSPFPSSEIYTTIPVREEILRSLLNCDLIGFHTFDYARHFLSCCSKMLGIDYQCKRGYIGLDYCGKTISIKILHMGIHMGQLESVLNMEQTATLAKQLKEKFEGKIVMVGVDDLDLLKGISSKFSAMGRLLEMRPELIGKVVLVQIANPARSQGKDVQEVQKETTLIAQQINQKYGYEGYQPIVFINGPVSTLEKAAYYAISECCVVNALRDGMNLVSYKYTVCRQGSPVLDKALGIDESYPRKSFLIVSEFIGCSPSLSGARRVNPWDVGAVADAMYAGIHMKDEEKHLRHEKHYKYISSHDVAFWARSFDLDLERACKDHYLKRYYNVGFGLNFRVAAVGTNFRMLTTERVVAAYNNTNSRLILLDYDGTMMPQCAVDKTPRSEVISILNCLCSDPKNVVFIVSGRGRDPLSKWFSPCETLGISAEHGYFTRWTKNSPWETCSVAMDCDWKKIVQPVMERYTETTDGSFIEPKESALVWHHQDADPDFGSCQAKELLDHLESVLANEPVVVRRGQQIVEVKPQGVSKGIVVENLISTMRSQGKSPDFLFCIGDDRSDEDMFESIARLVDNPSIPPIAEVFACTVGLKPSKAKYYLDDTPEVIKLLQGLATASVGSKYAHTLEDEDV

SEQ ID NO: 424 - DNA, 2562 bp, Populus tremuloides
atgatgtctagatcatataccaatctattagatctagcttctggtaactttccggcaatgggtcaacctcgggagagaaagcggttgcctcgtgtaatgacagttccgggggttatttctgagcttgatgatgatgtggctaatagtgtgacctcagatgtaccttcatcggtagttcaggaccggataatcattgtagggaatcagttgccggtaaaagcaaagcgcagaccggataataaaggatggagctttagttgggatgaggattcgttgttattgcagttaaaagatggcttgcctgaagaaatggaggttttatatgtcggttctttgcgggcagatattgatttgagtgaacaagaggatgtctcacagatcttgttggacaggttcaagtgtgtaccagcatttctgcctcctgatattttgtccaagttttatcatgggttttgtaaacagtatttgtggccactttttcattacatgcttcctatttcgggtaatcatggtgggcgatttgatcggtctttgtgggaggcatatgtggcagcaaataagatcttctcgcaaagggtgattgaagttataaatccagaggatgactatgtttggattcatgactatcatttgatggtgctgcctacattcttgaggagaaggttcaatagattgagaatgggattctttcttcacagtccatttccttcatctgagatatataggactttgcctgttagggaagagatccttaaggcactgttgaattcggacctcattggttttcacacttttgattatgcccgacattttctatcttgttgcagtcggatgttggggttggagtatcagtcaaagaggggttacattgggttagagtattatggcaggactgttggaataaagatcatgccagttgggatacatatggggcagattcagtctgtcttgaaacttgcggataaggattggagggtagaagagctcaaacaacagtttgaaggaaagacggttttacttggggttgatgatatggacatctttaaaggtgttaatttgaagcttttggcaatggagcagctgctgaaacagcacccaaagtggcaacgaagggctgttttggtgcagataactaatcctgccaggggacgagggagagatcttgaggaagtgcaagctgaaatacaggaaagctgcaggagaattaatgagacttttggtcgacctggctatgaaccagttgtctttattgatcgaccagtatctctcagtgaaagatctgcatatttcaccattgctgagtgtgttgttgtggcagctgtgagagatgggatgaatctcactccttatgagtatattgtgtgcagacagggagtttctgggtcagagtctagctcaggatcaagtggccccaagaagagcatgctggttgtatcagagttcattggatgttccccttcactcagtggtgcaattcgagtcaatccatggaacattgaagcaaccgcagaagcaatgaatgaggcaatttcaatggcagattccgagaaacaattgcgccatgaaaagcactacaggtatgtcagcacgcatgatgtggcatattggtcaaggagtttctatcaagatatggagcggacttgcaaagaccatttcagaaggcgctgctggggaattggcttgagctttggtttcagagttgtggcgcttgatcctaatttcaaaaaattaaatatagatcaaattgaatctgcatatataaagtccaaaaacagagctatactcttggactatgatggaactgtaatgcctcaaaccaccatcaataagaccccaaaccaagaggtcatttcaatcataaatactctttgtagtgatgtcaagaacaccgtctttgttgtcagtggaaggggaagggatagtttagggaagtggtttgctcattgcaagaaacttggaattgctgctgagcatgggtacttcatgaggtggtctgtggatgaggactgggagaactgcgggcagagtagtgattttggatggactcaaatagctgaacctgttatgaatctgtacacagaagccactgatggatcttccatcgagacgaaagagagcgctttggtttggcaccacagagatgcagatccaggttttggagctgctcaggccaaggaattgttggaccatcttgagagcgtgcttgcaaatgagcctgttgcagtcaaaagtggtcaatgcattgtggaagttaagccccagggaattagtaaaggttctgtggcagaaaagatctttacatcaatggctgaaagtggaagacaggctgattttgtattgtgtattggggatgacagatcagatgaggatatgtttgaaagcattgataatgcaatagcgaacggtatcctaacctcaagcaaatctgtcttcgcttgcactgttggtcagaaaccaagcaaagccaagtattatttggatgacacaactgatgtcataaacatgctcgaagctcttgcagaagcttccgacccttcaccctctgcaggaagctccccctga

SEQ ID NO: 425 - protein, 853 aa, Populus tremuloides
MMSRSYTNLLDLASGNFPAMGQPRERKRLPRVMTVPGVISELDDDVANSVTSDVPSSVVQDRIIIVGNQLPVKAKRRPDNKGWSFSWDEDSLLLQLKDGLPEEMEVLYVGSLRADIDLSEQEDVSQILLDRFKCVPAFLPPDILSKFYHGFCKQYLWPLFHYMLPISGNHGGRFDRSLWEAYVAANKIFSQRVIEVINPEDDYVWIHDYHLMVLPTFLRRRFNRLRMGFFLHSPFPSSEIYRTLPVREEILKALLNSDLIGFHTFDYARHFLSCCSRMLGLEYQSKRGYIGLEYYGRTVGIKIMPVGIHMGQIQSVLKLADKDWRVEELKQQFEGKTVLLGVDDMDIFKGVNLKLLAMEQLLKQHPKWQRRAVLVQITNPARGRGRDLEEVQAEIQESCRRINETFGRPGYEPVVFIDRPVSLSERSAYFTIAECVVVAAVRDGMNLTPYEYIVCRQGVSGSESSSGSSGPKKSMLVVSEFIGCSPSLSGAIRVNPWNIEATAEAMNEAISMADSEKQLRHEKHYRYVSTHDVAYWSRSFYQDMERTCKDHFRRRCWGIGLSFGFRVVALDPNFKKLNIDQIESAYIKSKNRAILLDYDGTVMPQTTINKTPNQEVISIINTLCSDVKNTVFVVSGRGRDSLGKWFAHCKKLGIAAEHGYFMRWSVDEDWENCGQSSDFGWTQIAEPVMNLYTEATDGSSIETKESALVWHHRDADPGFGAAQAKELLDHLESVLANEPVAVKSGQCIVEVKPQGISKGSVAEKIFTSMAESGRQADFVLCIGDDRSDEDMFESIDNAIANGILTSSKSVFACTVGQKPSKAKYYLDDTTDVINMLEALAEASDPSPSAGSSP

SEQ ID NO: 426 - DNA, 2586 bp, Populus tremuloides
atggtttcaagatcatattccaacctcttagatcttgcttctggtgatgctccaaattttggtcgtgagaggaagaggcttcctcgagtggcaactgttgctgggatactgactgatctagatgatgaaaacagtgttagctctgatgccccctcttctgtctctcaagaacggatgattattgtgggaaaccagcttccccttcgggcacatcgaagtccagatggcagtggagggtggtgctttagctgggatgaggactcacttctcttacaactcaaagatggccttggagaagatgttgaagttatctatgttggttctcttaaagaagagattgcacctagtgagcaagatgatgtagcccaaacattgctcgaaacttttaaatgtgtcccggcatttatccctcctgaccttttttctaaattctatcatggattctgtaaacaacatctgtggcctttatttcactacatgctccctttatcaccagatcttggtggccggtttgacaggtccctttggcaagcctatgtttctgttaacaaaatatttgcagacaaagttatggaagtgattagtcctgacgatgattatgtgtgggttcatgactaccatttgatggttttgccaacatttttgaggaagagatttaatagggtgaagcttggtttcttcctccacagtccattcccatcttctgaaatatataggacacttcctgtaagggatgaacttttgagagcacttctcaactctgacctcattggttttcatacctttgattatgcaaggcacttcctctcttgttgcagtagaatgctcggtctttcttatcaatctaagcgaggttacatagggcttgagtattatggtcggacagtcagcatcaagattctccctgttgggattcacattggtcagcttcaatctgtgcttaatcttcccgagacagaatctaaggttacagagctacatgatcggtttaggggtcaaactgttatgctaggggttgatgacatggacatcttcaaaggaatcagcctgaaacttttggccatggaacagttgctcacccaacatcctaataagaggggtgaagttgttttggttcaaattgcaaacccagcaaggggccgaggaagggatgtacaggaggtccaatctgaaaccaaggctgcagtgaggaggattaatgagacatttggaagtccaggatacactccagtggttttgattgacagcccgctacagttttatgagcgcattgcttattacacaattgcagagtgttgtcttgttacagcggtgagggatgggatgaatctgataccctatgaatatattatatgtcgacaaggaaatgagaagctggatgagacattaggattaaacccatcagccccaagaaagagcatgctggttgtttcagagtttattggatgctccccatcactaagtggggcaattcgagtaaatccatggaatattgatgctgtaactgaagccatgaattctgccctgatagtcccggagcctgaaaaacagatgcgacacgagaagcaccataggtatgtgagtacgcatgatgttgcatattgggctcatagttttttgcaggatcttgaaagggcatgtagggatcatgtgaggaggaggtgctggggaattggttttggtttaggttttcgagtcattgccttggatccaaatttcagaaaactttcagttgaacatattgtttctgcctataagaggaccaaaaaccgggctattctattggattacgatggtactatgatactgccaagttcaattagtaggactccaaacatggaggctgttggagtcttgaacagcttgtgtacagaccccaagaatgttgttttccttgttagtgggaaagacagggaaactcttactgaatggttttcttcttgtgaaaagcttggaattgctgcagagcatggttattttatgaggaccaatcatgatgtggaatgggaaacatgtgtgtctgtaccagattttgattggaaatgtatcgctgatccagtaatgaaactatacactgaaacaactgatggttcttccattgaaacaaaagagagtgcacttgtttggaattaccagtatgcagatccagattttggttcgtgccaggctaaggagcttctagatcatctggaaagtgttcttgccaatgaaccagttactgtcaagagcggtcaacacattgtagaggttaaacctcagggggtcaacaaaggtctggtggccgaacgcctcctagaaataatgaaacagaagggaatgcttcccgattttgttctctgcattggggatgaccggtctgatgaggacatgtttgaggtgataatgagtgcaagatctggcccctctctttccccagttgctgaagtgtttgcatgcactgttggccgaaaacccagcaaggccaagtactatttggaagacacatccgagattttgagaatgctgcaaggtcttgccagtgcttcggagcaggttgctagaagtgccccccaatcctctcagcaagtgattattgacagagagtaa

SEQ ID NO: 427 - protein, 861 aa, Populus tremuloides
MVSRSYSNLLDLASGDAPNFGRERKRLPRVATVAGILTDLDDENSVSSDAPSSVSQERMIIVGNQLPLRAHRSPDGSGGWCFSWDEDSLLLQLKDGLGEDVEVIYVGSLKEEIAPSEQDDVAQTLLETFKCVPAFIPPDLFSKFYHGFCKQHLWPLFHYMLPLSPDLGGRFDRSLWQAYVSVNKIFADKVMEVISPDDDYVWVHDYHLMVLPTFLRKRFNRVKLGFFLHSPFPSSEIYRTLPVRDELLRALLNSDLIGFHTFDYARHFLSCCSRMLGLSYQSKRGYIGLEYYGRTVSIKILPVGIHIGQLQSVLNLPETESKVTELHDRFRGQTVMLGVDDMDIFKGISLKLLAMEQLLTQHPNKRGEVVLVQIANPARGRGRDVQEVQSETKAAVRRINETFGSPGYTPVVLIDSPLQFYERIAYYTIAECCLVTAVRDGMNLIPYEYIICRQGNEKLDETLGLNPSAPRKSMLVVSEFIGCSPSLSGAIRVNPWNIDAVTEAMNSALIVPEPEKQMRHEKHHRYVSTHDVAYWAHSFLQDLERACRDHVRRRCWGIGFGLGFRVIALDPNFRKLSVEHIVSAYKRTKNRAILLDYDGTMILPSSISRTPNMEAVGVLNSLCTDPKNVVFLVSGKDRETLTEWFSSCEKLGIAAEHGYFMRTNHDVEWETCVSVPDFDWKCIADPVMKLYTETTDGSSIETKESALVWNYQYADPDFGSCQAKELLDHLESVLANEPVTVKSGQHIVEVKPQGVNKGLVAERLLEIMKQKGMLPDFVLCIGDDRSDEDMFEVIMSARSGPSLSPVAEVFACTVGRKPSKAKYYLEDTSEILRMLQGLASASEQVARSAPQSSQQVIIDRE

SEQ ID NO: 428 - DNA, 2574 bp, Populus tremuloides
atggtgtcaagttcttgcataagtttattggacttggcatctgggaatatgatgaatttcagtcaggctcctagagctcttccaaggataatgactgttccaggaataatttctgacatagatggagatggaactaatgatggcaattctgatgctccatcaactgttaaaaagattatagtgtcaaattttctccctctgaatgctcagaaggatttaaaatctggcaaatggtcattcagtttcgatgaggactcccttctgttacaaatgaaagatggcttctcagaaaataccgaggttgtttatgtgggatctctaagggttgatgttgatactagtgagcaagaagaagtttctcaacaattgctggaggaatttaactgtgtacccacatttattccttctgaaatttataaaaacttttaccatggtttctgtaagcatcatctgtggccccttttccattacatgctgcctatgtgtccagatcatggtaatcgctttgatagattgctgtggcagtcgtatgtctctactaataaaatatttgcagataaagtcatgggagtgattaattcagaagaagattatgtttgggtccatgattatcacctaatggttctccctacttttttgaggaaacgttttaatcgaattaagcttggcttcttcctgcatagcccattcccctcgtcagaaatttaccggactctgcctgttagagatgaaattctgaaagcactgctgaatgcagatttgattggttttcatacattcgattatgctcgccattttctatcctgttgcagccggatgttgggcctatactacgaatccaaacgtggtcatattggtctggagtattttggccgcacagtgtacatcaaaattttgcctgtggggattcatatgggtcgagttgaatctgctttaaatcacccctcttcttccatcaaggtcaaagaaatccaaaaacagttcaaggggaaaaggcttgttgttggagttgatgatatggacatattcaagggcattagtctgaaattattagctatggagcatcttttgcagcagaattcagggatgcggggaaagctagtcttggttcaaattgttaatcctgctaggagctcagggaaagctgtacaagaagcaaaaatggagacacatacaattaccaaaaggataaatgatacttttggttttccaggctatgaaccagtggtcctgattgatcgtcatgtccccttttgtgagaaaactgcctactttgcattggctgaatgctgcattgtaaatgcagtgagagatggaatgaacctgatcccatacaagtacattgcgtgcaggcagggtacgccgaagatggacgaagctttaggagttgcctctgggtcgcgtcatacaagttcacttgttgtatcagagtttactggttgctcaccatcattaagtggagcgataagagtgaacccatgggacattgaagctgttgccaacgcattgaatgtggccatcaccatgcctgatttagagaagcagttgcggcatgaaaagcactatcgctttgttagctcccatgatgtagcttactgggcccgcagttttatgcaggatttgacacgagcatgcgaagatcattatagtaaacgttgctggggcattggctttggtctgaatttcagaatcttgtcactctctcctagctttaggaagctttccaatgattacatcatctctgcatacaagagaacttctaaaagggcaatattcttggactatgatggaacagtggtggctcaaacttccattcctaaaacccccagtcctgaagtcatctctgttctaaacaatctttgttctgatcccaggaacaatgtgtttatagttagtggcagaggaaaaaagtctctgagtgattggtttgctcaatgtgaaaatctgggtatagcagctgaacatggatacttcttgaggtggagtgggatgtctgattgggaaacgagatccttcgctgctgattttgattggaaaaacattgccgaacctgtcatgaaattgtatacagaggccactgatggttcctatatagagaccaaggagagtgccttggtatggcaccaccaagatgccgatccagattttggatcttgccaggcaaaggaactgttggatcatctggaaaatgtccttgcaaatgatccggtagttgttaagaggggccagaatattgttgaagtaaaaccacagggagtaactaaagggtttgttgcagagaaggttctttcctcgatgattgctaatgggaaacccccagatttcgtgttgtgcattggggatgacagatctgatgaagacatgtttgaaagcatgtcaaacacagcttatggttcgtcactcccttcagctccagcgatttttgcatgcactgttggccaaaagccaagcaaagctagatactatctagatgatactgttgatgtattagctttgcttcaatgcttggctgatgcttcaaattcaaagtcaagtagcacagaaacacaagtttctttcgataatgttgtctga

SEQ ID NO: 429 - protein, 857 aa, Populus tremuloides
MVSSSCISLLDLASGNMMNFSQAPRALPRIMTVPGIISDIDGDGTNDGNSDAPSTVKKIIVSNFLPLNAQKDLKSGKWSFSFDEDSLLLQMKDGFSENTEVVYVGSLRVDVDTSEQEEVSQQLLEEFNCVPTFIPSEIYKNFYHGFCKHHLWPLFHYMLPMCPDHGNRFDRLLWQSYVSTNKIFADKVMGVINSEEDYVWVHDYHLMVLPTFLRKRFNRIKLGFFLHSPFPSSEIYRTLPVRDEILKALLNADLIGFHTFDYARHFLSCCSRMLGLYYESKRGHIGLEYFGRTVYIKILPVGIHMGRVESALNHPSSSIKVKEIQKQFKGKRLVVGVDDMDIFKGISLKLLAMEHLLQQNSGMRGKLVLVQIVNPARSSGKAVQEAKMETHTITKRINDTFGFPGYEPVVLIDRHVPFCEKTAYFALAECCIVNAVRDGMNLIPYKYIACRQGTPKMDEALGVASGSRHTSSLVVSEFTGCSPSLSGAIRVNPWDIEAVANALNVAITMPDLEKQLRHEKHYRFVSSHDVAYWARSFMQDLTRACEDHYSKRCWGIGFGLNFRILSLSPSFRKLSNDYIISAYKRTSKRAIFLDYDGTVVAQTSIPKTPSPEVISVLNNLCSDPRNNVFIVSGRGKKSLSDWFAQCENLGIAAEHGYFLRWSGMSDWETRSFAADFDWKNIAEPVMKLYTEATDGSYIETKESALVWHHQDADPDFGSCQAKELLDHLENVLANDPVVVKRGQNIVEVKPQGVTKGFVAEKVLSSMIANGKPPDFVLCIGDDRSDEDMFESMSNTAYGSSLPSAPAIFACTVGQKPSKARYYLDDTVDVLALLQCLADASNSKSSSTETQVSFDNVV

SEQ ID NO: 430 - DNA, 2631 bp, Solanum lycopersicum
atgttgtcaagatcttgtttcaatctgcttaatcttgatgactgttctgttactgatcgggctcgaatcccaaagttgatgaatgttccagggattataacagattttggtggaggaggaggagaagaagagaagggggaagtttcacctggtgtgaaaaatgggagtagaaggatcattgtagcaaatcagttaccagtgaaagctttttgtaaagatgaaaaagaggggaaaaaatggtgttttgaatgggacagatatgctttagatacattgattttgcagctgaaagatggtttgtcaccagatttggagattgtttatgttggttgtttaaaagctgatgttgaattgaatgatcaagaagaagttgctaatttcttatgggagaaatttaggtgtgtaccaactttcttgtcattagatttgataaacaagtattaccatggcttttgtaagcattatttatggcctttgtttcattacatgttgcctttaacatctagtcatggtgtaagatttgataggtctaattggttggcttatgtatcagcaaacaagatttttgctgataaagtttatgaggtgattaatcctgatgatgattatgtttggattcaagattatcatcttatgattttgcctactatgttgaggaaaaagtatagtaggataaaagttgggtttttccttcatagtcctttcccgtcgtctgaaatttatcgaacattgcctgttagggatgagattttaagggctttgttgaattgcgatcttgttggttttcagacatttgattatgctagacatttcttgtcatgttgtagtaggatgttaggtttggattatcagtcaaaaaggggctacattggtatcgactattttggtagaactgtgactattaaaatccttcctgttggtattcacatggggcagatccaaaatgttatgtctttgcctgatacagcgaaaaaggcgaaggaattgaaagagaagtatgaggggaaaattgtgttgttaggtatcgatgatatggatgtgtttaaagggattggtctgaagtttttagcgatgggacatcttcttgagcaatcaccgtcgttgaggggaagggtagtgttggttcagattacgaaccctccgagaagtagaggaaatgatatcagagaggttgaagaagaggtcaagaagattgccagtgagatcaatacgaaatatggtaaaccggggtatgaaccgattgtctgtattaacggtccagtttctacgcaggacaagatagctcactatgcgatttctgagtgtgttgttgttaatgctgttagagatggaatgaatttggtgccttatgagtatacagtctctagggagagcaacagtaatttggataaggccttgggtccaggttttaatggaggacgacgaaagagtatgattgttgtttctgagttcatcggctgctcgccgtctctcagcggtgccatcagggtcaatccatgggacattgagagtgtagccactggtatgacttcaggagccatgatgaatgatagggagaaagaattgcgtcatgagaagcactatagatatgtttcttctcatgacgttgcatattgggcgaggagttttgatcaagatctcaagagagcttgtgaagatcattatcacaagagatgttggggtattggccttggtcttggcttcagggttgttgcgcttgggccgaatttcaagaagctttcggtagcccatatcgtctcttcttataaattgacaaacagcaggctcatcctactcgactatgatggtactatgttaccagaggataaagtggacaaagccccaagtcaagaagtcatctcagttctgaatggtttatgcagtgatccaaagaacatcgtgtttatcgtgagcggcaggggaagggatacgctcagcaagtggttttctccgtgtgcagaacttggcttatcagcagagcatggttacttcactaggtggaggaaggattccgattgggaatctcgtctggtacctgcagacactgagtggaaaaaagtggtcttgcctattatgaagaaatacaccgaggcaacagatggttcttcgatagagcagaaggaaagtgcactagtgtggcatcatcttgaagctgatcctgactttggcatttggcaggctaaagagcttcttgatcatctcgagagtgtgctcgctaacgagcctgtggttgttaaacgaggccagcacattgttgaggtgaaaccacaggatgtaagcaaaggtctggtgtttcaaagcctcttggcatcgatgaaaagcaaagggaagtcacccgatttcgtgttgtgcataggtgatgacagatcagatgaagacatgtttgagagcattgcaagttctttagacaacagttctctgcctgataatgcagaagtctttgcctgcaccgtcgggcagaaaccgagtatggctaagtactatcttgatgatccagctgaagttataaaaatgcttcaaggcctttcagcagcttctacagcaatgcagctaccacctaagtcaccggtccatcaactcgcctctgtcgaagatctctccctagttaagaatcatgcatcctttgtatag

SEQ ID NO: 431 - protein, 876 aa, Solanum lycopersicum
MLSRSCFNLLNLDDCSVTDRARIPKLMNVPGIITDFGGGGGEEEKGEVSPGVKNGSRRIIVANQLPVKAFCKDEKEGKKWCFEWDRYALDTLILQLKDGLSPDLEIVYVGCLKADVELNDQEEVANFLWEKFRCVPTFLSLDLINKYYHGFCKHYLWPLFHYMLPLTSSHGVRFDRSNWLAYVSANKIFADKVYEVINPDDDYVWIQDYHLMILPTMLRKKYSRIKVGFFLHSPFPSSEIYRTLPVRDEILRALLNCDLVGFQTFDYARHFLSCCSRMLGLDYQSKRGYIGIDYFGRTVTIKILPVGIHMGQIQNVMSLPDTAKKAKELKEKYEGKIVLLGIDDMDVFKGIGLKFLAMGHLLEQSPSLRGRVVLVQITNPPRSRGNDIREVEEEVKKIASEINTKYGKPGYEPIVCINGPVSTQDKIAHYAISECVVVNAVRDGMNLVPYEYTVSRESNSNLDKALGPGFNGGRRKSMIVVSEFIGCSPSLSGAIRVNPWDIESVATGMTSGAMMNDREKELRHEKHYRYVSSHDVAYWARSFDQDLKRACEDHYHKRCWGIGLGLGFRVVALGPNFKKLSVAHIVSSYKLTNSRLILLDYDGTMLPEDKVDKAPSQEVISVLNGLCSDPKNIVFIVSGRGRDTLSKWFSPCAELGLSAEHGYFTRWRKDSDWESRLVPADTEWKKVVLPIMKKYTEATDGSSIEQKESALVWHHLEADPDFGIWQAKELLDHLESVLANEPVVVKRGQHIVEVKPQDVSKGLVFQSLLASMKSKGKSPDFVLCIGDDRSDEDMFESIASSLDNSSLPDNAEVFACTVGQKPSMAKYYLDDPAEVIKMLQGLSAASTAMQLPPKSPVHQLASVEDLSLVKNHASFV

SEQ ID NO: 432 - DNA, 2613 bp, Zostera marina
atgatgtcaagatcgtacacaaatcttctggatctagcgtcggggaacttcccggtgattagtggcggtggacgggatggtcgtagcggtgggatgcgacgaatgccgcgagtgatgactgttccgtcaaacatagcggagcttgaggatgaacaagcgagtagtgttgcttcggatgtgcagtcttctattattcaagatcggttaataatagtcggtaaccaacttcctgttgtcgccaaacgccgatcagataacgccggttgggatttctcttgggatgatgagtctctccttcttcaactcaaagacggcttaccggatgatatggaagtcttatacgtcggttgcctccgtgtcatcgtcgatcctgaagaacaagacgacgtctcccaaacactacttgagaagttcaaatgcgtgccggcatttctaactgaggaaatccttgaaaagtactatcacggcttctgcaagaagctactgtggccgttgtttcattacatgttgccattgacgaaagatcatggtggaaggtttgataggtctctttgggaggcttatgttgcggtgaacaagatattttcacagaaggttgttgaaattattagtccagaagatgactatgtttggattcatgattaccatctcatggttcttccaactttgcttagacgaaggtttattcggcttcgaatgggtttttttcttcacagcccgttcccatcatcagagatttatagaacacttcccgtacgtgaagagattctaaattcgctactatgttccgatttgattggattccacacatttgattatgcacggcatttcttgtcatgttgtagtagaatgatggggttggaataccaatcaaaacgagggtatatcagtttagattactttggccgaacggttggaatcaagatcatgcccgccagtattcatttgggccagttggagtctatgttgaagactgtgtataaggagtcgaagattgaggaacttgagaggcagtttcaggggaagactgtcattttaggagttgatgatatggatatctttaaggggattaatttgaaattattggccttcgaacagatgctgaagcttcgtcctaattggcagggaagggctgtgctggttcagatcgccaatcctgcaagagggagaggaaagggacttgaaagtgtggaggttgagattcgagatatttgtgaaaggatcaatcaacagtttggacgtgttggttacaaacctgtagtgtacatcaatcgatctgtttcattgaaagaaaggattgcctattacacaatcgcagaatgtgttgttgtttccgcagtgagggatgggatgaatctaataccatatgagtacactgtctgtaagcaaggaatcgccgagcctgaatcagattcattatttgctgatccaaaaaaaagtatgttggtcgtgtcagaattcattggttgttctccttctttgagtggtgcaatcaagattaatccttggaacagcgaagcgactgcagaggctatgagtgatgcaatctcgatgcccgatggagagaagcaattgcgtcatgggaagcattatagatatgttcggactcatggtgtttcatattggtcaaaaagtttcatgcaggatatggagaggacatgcaaggatcattttaagaggagatgttggggtattggattcgggtttggttttagagttgttgccctcgatcctaatttcaaaaaactcaatgtggactccattgtgttttcatatgaaagggccaaaagtagggctatattattggattatgatggaacgatgattaatccattatctattaacaaaacaccgagcactgaagtgatctctattttgaacgctcttagtaaagacaaaaagaatgttgtttttatggtgagtggcaggggaagggagagtttagggagttggttttcttcatgcgagaagcttggaattgcagcagagcatggttttttcatgaggtgggggcgagatgatgaatggacgacttgggacaaaaataaagattttgggtggatgttgatggcggatcctgtaatgaaattatacacagaggctacagatggatcatatattgaagccaaagaaagtgccttggtttggcaccaccgagatgccgatcaaacttttggaacctctcaagcaaaagagatgttagaccatctcgaaaacgttttggctaacgaacctgttatcgcaaagcgtggccaattcattgttgaagttaagccacagggagttagcaaaggtttagtagcagataacattttatcaacaatggctaagagaaactgcccagcagattttgtattgtgtattggtgatgatagatcagatgaagacatgtttgaaaactttggtagcaagaatttggtatcctttaatgcacatatatattcctgcacggttgggcaaaaacctagcaaagccacttattatttagatgacactaatgatgttttggaaatgcttcgtgcccttgctgatgcctccgaagaagatgatgacgatgaagaggaaatcgaagatgattatgttgatgatgaatcggaagaaggttcaagttaa

SEQ ID NO: 433 - protein, 870 aa, Zostera marina
MMSRSYTNLLDLASGNFPVISGGGRDGRSGGMRRMPRVMTVPSNIAELEDEQASSVASDVQSSIIQDRLIIVGNQLPVVAKRRSDNAGWDFSWDDESLLLQLKDGLPDDMEVLYVGCLRVIVDPEEQDDVSQTLLEKFKCVPAFLTEEILEKYYHGFCKKLLWPLFHYMLPLTKDHGGRFDRSLWEAYVAVNKIFSQKVVEIISPEDDYVWIHDYHLMVLPTLLRRRFIRLRMGFFLHSPFPSSEIYRTLPVREEILNSLLCSDLIGFHTFDYARHFLSCCSRMMGLEYQSKRGYISLDYFGRTVGIKIMPASIHLGQLESMLKTVYKESKIEELERQFQGKTVILGVDDMDIFKGINLKLLAFEQMLKLRPNWQGRAVLVQIANPARGRGKGLESVEVEIRDICERINQQFGRVGYKPVVYINRSVSLKERIAYYTIAECVVVSAVRDGMNLIPYEYTVCKQGIAEPESDSLFADPKKSMLVVSEFIGCSPSLSGAIKINPWNSEATAEAMSDAISMPDGEKQLRHGKHYRYVRTHGVSYWSKSFMQDMERTCKDHFKRRCWGIGFGFGFRVVALDPNFKKLNVDSIVFSYERAKSRAILLDYDGTMINPLSINKTPSTEVISILNALSKDKKNVVFMVSGRGRESLGSWFSSCEKLGIAAEHGFFMRWGRDDEWTTWDKNKDFGWMLMADPVMKLYTEATDGSYIEAKESALVWHHRDADQTFGTSQAKEMLDHLENVLANEPVIAKRGQFIVEVKPQGVSKGLVADNILSTMAKRNCPADFVLCIGDDRSDEDMFENFGSKNLVSFNAHIYSCTVGQKPSKATYYLDDTNDVLEMLRALADASEEDDDDEEEIEDDYVDDESEEGSS

SEQ ID NO: 434 - DNA, 2598 bp, Zea mays
atggtttcaaaatcatactcaaatctgctagacctgacctctggagatggatttgactttcgacaaccttttaagtctcttcctcgtgtcgtaacttctcctggtattatatctgacactgattgggatacaataagtgatggtgattcagttggttcagcatcttctactgagaggaaaataatcgttgccaacttccttccgttgaattgtacaagagatgaaactggggtgctttccttctcattggatcatgatgcgcttctcatgcaacttaaagatagtttttcaaatgagactgatgttgtgtatgtgggcagtttgaaggttcaggtagatcctggtgagcaggaccaagttgcacagaagcttcttagagaatatcgatgcatacctacttttctcccatctgacctacagcagcagttctatcatggcttctgtaaacaacaattatggccactttttcattatatgcttccaatttgccttgacaagggtgagctatttgatcgcagcctgtttcaagcttatgtccgagccaacaaactttttgcagataaagttatggaagcaatcaatgcagatgatgacttcgtttgggttcatgattatcatctcatgttgctccctacattcttgaggaagaggttacaccgaataaagattggtttcttccttcacagtccttttccctcctcagaaatctataggactctgcctgtaagggatgaaatcctgaagtcactgcttaatgctgatctcattggtttccaaacatttgactatgcccgccacttcctatcttgctgtagcagattgctaggcctgcattatgagtcaaaacgtggttacattggaatagagtattttggccgaacagtgagcctgaagatcctttccgtgggtgtccatattggtcggcttgaatctgtcttaaaattgcctgctacagttagtaaggttcaagaaattgaacaaaggtataagggcaagatactgatgttaggtgtagatgacatggacatcttcaaagggataagtctgaaatttcttggactggagcttcttctggacagaaacccaaagcttagagagaaggttgtccttgtacaaatcatcaatccagcaagaagcacagggaaggacgtgcaagaagctattacagaagctgtctctgtggctgaaaggattaatacaaattatggttcttcaagttacaagcctgttgtcctaattgatcaccacataccattttatgaaaagattgcattctatgctgcgtctgattgctgtattgtaaatgctgtgagggatggcatgaacttagtaccatatgagtatactgtttgccgacagggaaatgaggagattgataaactcagaggtcttggcaaagacacccatcacacaagcacacttattgtttcggagtttgtgggttgctccccatctcttagtggtgctttcagggtaaatccttggagtgtcgatgatgtggcggatgccttgtgccgtgcaactgatttgactgaatccgagaaacggctgcggcatgaaaagcattatcgctatgtcagtactcatgatgttgcttactgggcacgcagctttgctcaagatctggaaagagcatgcaaagatcattatagcagaaggtgttgggcgattggattcggtctgaattttagagttattgctctttctcctggcttcagaaagctgtcgtcagagcactttgtttcttcttataacaaggcttctagaagagcaatatttcttgattacgatggcacacttgtgccccagtcatcaatcaacaaagctccaagtgaagaagtcatttccgttcttaacaccttatgtaatgatccaaagaacattgtgtttatagtaagtggacgaggacgtgattcccttgatgagtggttttctccgtgtgagaagcttggtctagcggcagaacatggctattttatcagatggagcaaggaagccgcatgggagtcaagctattcaaggccgcagcaagaatggaagcacattgccgaacctgtgatgcaggtatacacagagacaacagatggatcttcaatcgagtcaaaggaaagcgccctagtatggcactatttggacgcggaccatgatttcggttccttccaagcaaaggagctacaaggtcatcttgagagggtgctatcgaatgagcctgttgttgtgaagtgtggtcattatattgtagaggtgaaaccacagggagttagcaaggggcttgctgtcaacaagctgattcacacactggtcaagaacgggaaggcaccggatttcctgatgtgcgtcggcaacgacagatctgatgaggacatgtttgaaagcatcaacggtatgacctccaacgctgtcttatcacccacaatgccggagctgtttgcctgttcagtcggtcagaagcccagcaaagcaaaatattatgtggacgacaccagcgaagtaatcagattgctcaagaatgtaacccgcatcccctcgcagcggcaggatgtcagtgccagccatgggcgtgtgaccttcagaggcgtgctcgattacgtggactag

SEQ ID NO: 435 - protein, 865 aa, Zea mays
MVSKSYSNLLDLTSGDGFDFRQPFKSLPRVVTSPGIISDTDWDTISDGDSVGSASSTERKIIVANFLPLNCTRDETGVLSFSLDHDALLMQLKDSFSNETDVVYVGSLKVQVDPGEQDQVAQKLLREYRCIPTFLPSDLQQQFYHGFCKQQLWPLFHYMLPICLDKGELFDRSLFQAYVRANKLFADKVMEAINADDDFVWVHDYHLMLLPTFLRKRLHRIKIGFFLHSPFPSSEIYRTLPVRDEILKSLLNADLIGFQTFDYARHFLSCCSRLLGLHYESKRGYIGIEYFGRTVSLKILSVGVHIGRLESVLKLPATVSKVQEIEQRYKGKILMLGVDDMDIFKGISLKFLGLELLLDRNPKLREKVVLVQIINPARSTGKDVQEAITEAVSVAERINTNYGSSSYKPVVLIDHHIPFYEKIAFYAASDCCIVNAVRDGMNLVPYEYTVCRQGNEEIDKLRGLGKDTHHTSTLIVSEFVGCSPSLSGAFRVNPWSVDDVADALCRATDLTESEKRLRHEKHYRYVSTHDVAYWARSFAQDLERACKDHYSRRCWAIGFGLNFRVIALSPGFRKLSSEHFVSSYNKASRRAIFLDYDGTLVPQSSINKAPSEEVISVLNTLCNDPKNIVFIVSGRGRDSLDEWFSPCEKLGLAAEHGYFIRWSKEAAWESSYSRPQQEWKHIAEPVMQVYTETTDGSSIESKESALVWHYLDADHDFGSFQAKELQGHLERVLSNEPVVVKCGHYIVEVKPQGVSKGLAVNKLIHTLVKNGKAPDFLMCVGNDRSDEDMFESINGMTSNAVLSPTMPELFACSVGQKPSKAKYYVDDTSEVIRLLKNVTRIPSQRQDVSASHGRVTFRGVLDYVD

SEQ ID NO: 436 - DNA, 2742 bp, Zea mays
atgatgtcgcggtcgtacaccaacctgctcgacctcgcggagggcaacttcgcggcgctgggcccggccgccggcgccggcggcagcgggcggcagaggcatgggtcgttcgggctgcggcggatgtcgcgggtgatgacggtgccggggacgctgacggagctcgacggcgaggacgagtcggagccggccgcgaccagcagcgtcgcctccgacgtgccctcgtccgtggcggcggaccgcctcatagtggtctcgaatcagttgcccatcgtcgcgcgccgcaggcccgacggccgagggtggtccttctcgtgggacgatgactcgctcctgctccagctccgcgacggcattcccgacgagatggaggtgctcttcgtcggatcactccgcgccgacgtccccgcagccgagcaggacgcggtatcgcaggcgctgctcgaccgattccgctgcgcgccggtgttcctccctgaccacctcaacgaccggttctaccacggcttctgcaagcgccagctctggcctctgttccactacatgctccccttctcatcgcccgcttccgcgtctgccgccgctacctcttcctccgtcgccacttcgtcacccggcaacggttgcttcgaccgcagcgcttgggaggcatacgtgctcgccaacaagttcttctttgagaaggtcgtcgaggtaatcaacccggaggatgactacgtctgggttcacgactaccatctcatggcgctgcctaccttcctccgccgctgcttcaaccgcctccgcatcggattcttcctccacagccccttcccctcgtccaagatctaccgcaccctccctgttcgggaggagatactcaaggcgctgctcaactgtgacctaattggcttccacacttttgattacgccaggcacttcctctcgtgctgcagtaggatgctgggaattgaataccagtcaaagcgtgggtacattgaattggattactttggccgcactgtcgggatcaaaatcatgccagtgggagttcatatgggtcaattggagttgggtctgcgcttgcctgatagggaatggaggctttctgagcttcaacgccagtttcaggggaaaactgtcttgcttggtgtggatgatatggatatctttaaggggatcaatttgaagcttctcgcctttgagaacatgttgaggacacatcccaagtggcaggggagagcagtgttagtgcagattgctaacccagcccgtggaaggggtaaagatctggaagccatccaggctgagattgaggagagctgccagcggatcaatggagactttggccagtcagggtatagccctgttgttttcatcgatcgtgatgtgtcaagtgttgagaagattgcctattatacgatagcggaatgtgtggtggtgactgctgtgagggatgggatgaacttgacaccgtatgaatacgttgtctgtaggcagggtgcaccaggatctcagtcggtagcagaggtgagtgggccaaagaagagcatgctggttgtgtcagagtttattggctgctcaccgtcactgagcggtgctattagggttaacccatggaatatagaggcaaccgcggaggcgatgaatgaggccatttcaatgccagaacaggaaaaacagttgaggcatgagaaacattaccgttatgtcaggagccatgacgtcgcttattggtcaaagagcttcatcatagacttggaaagggtttgtaaggatcacttcaagaggacttgttggggcatagggttgggttttggtttcagggtggtggccttggaccctcatttcacaaagcttaacatggattcaatcattaatgcttatgagctttcagagagcagggctatattgctcgattatgatggaactctggttccccaaacttccctcaacaaggaacctagtccacaggttttgagcatcatcaataccctttgctcagatagtagaaacatcgtttttcttgtcagtggtcgagacaaagataccttgggaaagtggttctcctcatgtccaagattggggattgcagctgaacatggttacttcttgaggtggtctagagaagaagagtggcaaacatgcactcaggcattggacttcggatggatgcaaatggcgaagccagtgatgaatttatatacagaagcaactgatggatcctacattgaggccaaggaaagtgccttggtgtggcaccatcaggatgctgacctaggctttggatcctcacaggcaaaggagatgcttgatcacctggaaagtgtactagcaaatgaaccagtctctgtcaagagtggccagttcattgttgaagtcaaaccacagggaataagcaaaggaatagttgctgagaggatacttgcatcagtgaaggagagaggaaagcaggctgatttcttattgtgcatcggcgatgataggtctgatgaggacatgtttgaaaatattgctgatatcactgggaggaatttggttgctccaagaacagcactgtttgcgtgcactgtgggacaaaaaccaagcaaagccaaattctatctggatgatacattcgaagtggtcactatgctgagcgcactggcagatgccacaggtcctgagactgattcggctgatgaatctgtcgcatatatctcatcacttgatattggtgacgaacaatcagaatccagtgataaaccagttgaagggtcttag

SEQ ID NO: 437 - protein, 913 aa, Zea mays
MMSRSYTNLLDLAEGNFAALGPAAGAGGSGRQRHGSFGLRRMSRVMTVPGTLTELDGEDESEPAATSSVASDVPSSVAADRLIVVSNQLPIVARRRPDGRGWSFSWDDDSLLLQLRDGIPDEMEVLFVGSLRADVPAAEQDAVSQALLDRFRCAPVFLPDHLNDRFYHGFCKRQLWPLFHYMLPFSSPASASAAATSSSVATSSPGNGCFDRSAWEAYVLANKFFFEKVVEVINPEDDYVWVHDYHLMALPTFLRRCFNRLRIGFFLHSPFPSSKIYRTLPVREEILKALLNCDLIGFHTFDYARHFLSCCSRMLGIEYQSKRGYIELDYFGRTVGIKIMPVGVHMGQLELGLRLPDREWRLSELQRQFQGKTVLLGVDDMDIFKGINLKLLAFENMLRTHPKWQGRAVLVQIANPARGRGKDLEAIQAEIEESCQRINGDFGQSGYSPVVFIDRDVSSVEKIAYYTIAECVVVTAVRDGMNLTPYEYVVCRQGAPGSQSVAEVSGPKKSMLVVSEFIGCSPSLSGAIRVNPWNIEATAEAMNEAISMPEQEKQLRHEKHYRYVRSHDVAYWSKSFIIDLERVCKDHFKRTCWGIGLGFGFRVVALDPHFTKLNMDSIINAYELSESRAILLDYDGTLVPQTSLNKEPSPQVLSIINTLCSDSRNIVFLVSGRDKDTLGKWFSSCPRLGIAAEHGYFLRWSREEEWQTCTQALDFGWMQMAKPVMNLYTEATDGSYIEAKESALVWHHQDADLGFGSSQAKEMLDHLESVLANEPVSVKSGQFIVEVKPQGISKGIVAERILASVKERGKQADFLLCIGDDRSDEDMFENIADITGRNLVAPRTALFACTVGQKPSKAKFYLDDTFEVVTMLSALADATGPETDSADESVAYISSLDIGDEQSESSDKPVEGS

SEQ ID NO: 438 - DNA, 2595 bp, Zea mays
atggttctgaagtcgcacacaaatctgctagatatgtgttgtgaagatgtgtttgacttccaacaacctttaagatctcctcgtcatgtggtgaactctcctggcatcatatctgaccctgattgggaaagtagtaatgatggcaactcagttggttctatgcctttttgttttaagagaaagattattgttgcaaatttccttcctgtgatctgtgcaaaaaatgaagctaccggagaatggtcctttgccatggatgataatcaactgcttgttcaactcaaagatggttttccaattggtaatgaagttatttatgtgggtagtttgaatgttcaagttgatcctattgagcaagatcgagtttctcagaagctcttcaaggaacacagatgcgtacctacctttctcccagctgaactccagcatcaattctatcacatattctgcaaacagcacttatggccacttttccattatatgcttcctgtttgtcatgacaaagatgagctctttgaccgttccctttttcaagcctacgtgcgggccaacaaaatttttgctgacaaaattgtggaggcagtcaattcggatgatgattgtgtgtgggttcatgattatcacctcatgcttatcccaacccttttaagaaagaaactgcaccggatcaaagttggtttcttcctccacagcccatttccctcgtctgagatctataggacactgccagtgcgggatgaaattctaaaatcacttcttaatgctgacctcattggctttcaaacttttgactatgcccgccacttcctttcatgttgcagcaggcttttaggccttaattatgagtccaaacgtggccacataggtatagagtacttcggccgaacagtgagcctcaagattcttgctgcaggtgtacatgttggccggcttgaggctacattgaggttgcctgctacaattaaaaaggttcaagaaattgagagtagatatagtggcaagttggtaatattaggtgtagatgacatggacatctttaaaggtatcagtctaaaactgcttggcttggagcttcttctggaaagaacacctaagcttcgaggcaaggttgtccttgtacagattgttaatcctgcaagaagcatcggaaaagacattgaggaagcgaaatatgaagctgaatctgtagctcaaaggataaatgataaatatggttctgctaattacaagcctgttgtcctcattgactactcaatacctttctatgaaaagatcgcattttatgctgcatctgactgctgtattgtaaatgctgtgagggatggcatgaatttgataccgtatgagtacaccgtatgcaggcagggaaatgaggagcttgataagctcagaggtcttaataagagctcatctcacacaagcacacttattgtgtctgaatttgtgggttgctctccatcacttagtggagcattcagggtaaatccttggagtatggaagatgtggctgatgcattatacagtgtaacagacctgacacgatatgagaagaatctgcgccatgaaaagcactatcgctatgtcaggtctcatgatgttgcttactgggcacgcagctttgaccaggatctggataaagcatgcatagagcaatacagccaaagatgttggacaactgggtttggtttaaattttagagttattgccctttcacctgggtttagaagactgtctctagaacacctagcctcgtcttataagaaggctaacaggaggatgatattcctggactacgatgggacccttgtgccgcagacatcacacgacaaatctccaagcgctgaacttatctctacccttaacagcttgtgcagtgatatgaagaacacagtatttatagtcagcggacgaggaagagattccctaagcgagtggtttgcttcatgcgagaacctcggtatcgctgccgaacatggttactttatcagatggaacaaagcagctgaatgggagacaagcttctcaggtatttattctgaatggaagctcatcgcggaccctatcatgcatgtatacatggaaacaactgatgggtccttcatagagccaaaagagagcgctttggtatggcactatcagaacacggatcatgactttggctcgtgccaggcaaaggagctagtgagccatcttgagcgagtcctatcgaacgaacctgttgtcgtgaggcgtggccatcagatcgtagaagttaaacctcagggagttagcaaggggatttccgtggacaagatcatccggaccttggtcagcaaaggggaagtaccagaccttttgatgtgcatcggaaacgatcggtcggacgaggacatgttcgagagcatcaacagagccacctccctttccgagcttcctgccgctccagaagtattcgcctgttccgttggccccaaggccagcaaggcaaactactacgtcgatggctgcgacgaagtaatcagactgctgaagggtgtcacagccgtttcgctccaaaaggatactgccggccatagccatgcggcattcgaggatacgcttgaggttgtcagctga

SEQ ID NO: 439 - protein, 864 aa, Zea mays
MVLKSHTNLLDMCCEDVFDFQQPLRSPRHVVNSPGIISDPDWESSNDGNSVGSMPFCFKRKIIVANFLPVICAKNEATGEWSFAMDDNQLLVQLKDGFPIGNEVIYVGSLNVQVDPIEQDRVSQKLFKEHRCVPTFLPAELQHQFYHIFCKQHLWPLFHYMLPVCHDKDELFDRSLFQAYVRANKIFADKIVEAVNSDDDCVWVHDYHLMLIPTLLRKKLHRIKVGFFLHSPFPSSEIYRTLPVRDEILKSLLNADLIGFQTFDYARHFLSCCSRLLGLNYESKRGHIGIEYFGRTVSLKILAAGVHVGRLEATLRLPATIKKVQEIESRYSGKLVILGVDDMDIFKGISLKLLGLELLLERTPKLRGKVVLVQIVNPARSIGKDIEEAKYEAESVAQRINDKYGSANYKPVVLIDYSIPFYEKIAFYAASDCCIVNAVRDGMNLIPYEYTVCRQGNEELDKLRGLNKSSSHTSTLIVSEFVGCSPSLSGAFRVNPWSMEDVADALYSVTDLTRYEKNLRHEKHYRYVRSHDVAYWARSFDQDLDKACIEQYSQRCWTTGFGLNFRVIALSPGFRRLSLEHLASSYKKANRRMIFLDYDGTLVPQTSHDKSPSAELISTLNSLCSDMKNTVFIVSGRGRDSLSEWFASCENLGIAAEHGYFIRWNKAAEWETSFSGIYSEWKLIADPIMHVYMETTDGSFIEPKESALVWHYQNTDHDFGSCQAKELVSHLERVLSNEPVVVRRGHQIVEVKPQGVSKGISVDKIIRTLVSKGEVPDLLMCIGNDRSDEDMFESINRATSLSELPAAPEVFACSVGPKASKANYYVDGCDEVIRLLKGVTAVSLQKDTAGHSHAAFEDTLEVVS

SEQ ID NO: 440 - DNA, 3755 bp, Arabidopsis thaliana
tttgtacaaaaaagcaggcttaaacaatggattataataggcaacgactacttgtagtggctaacaggctcccagtttctgccgtgagaagaggtgaagattcatggtctcttgagatcagtgctggtggtctagtcagtgctctcttaggtgtaaaggaatttgaggccagatggataggatgggctggagttaatgtgcctgatgaggttggacagaaggcacttagcaaagctttggctgagaagaggtgtattcccgtgttccttgatgaagagattgttcatcagtactataatggttactgcaacaatattctgtggcctctgtttcactaccttggacttccgcaagaagatcggcttgccacaaccagaagctttcagtcccaatttgctgcatacaagaaggcaaaccaaatgttcgctgatgttgtaaatgagcactatgaagagggagatgtcgtctggtgccatgactatcatcttatgttccttcctaaatgccttaaggagtacaacagtaagatgaaagttggatggtttctccatacaccattcccttcgtctgagatacacaggacacttccatcacgatcagagctccttcgctcagttcttgctgctgatttagttggcttccatacatatgactatgcaaggcactttgtgagtgcgtgcactcgtattcttggacttgaaggaacacctgagggagttgaggatcaaggcaggctcactcgtgtagctgcttttccaattggcatagattctgatcggtttatacgagcacttgaggtccccgaagtcatacaacacatgaaggaattgaaagaaagatttgctggcagaaaggtgatgttaggtgttgatcgtcttgacatgatcaaagggattccacaaaagattctggcattcgaaaaatttctcgaggaaaatgcaaactggcgtgataaagtggtcttattgcaaattgcggtgccaacaagaactgacgttcctgagtatcaaaaactcacaagccaagttcatgaaattgttggacgcattaatggtcgttttgggacactgactgcagttccaatacatcatctggatcggtctctggactttcatgctttatgtgcactttatgccgtcacagatgttgcgcttgtaacatctttgagagatgggatgaatcttgtcagttatgagtttgttgcttgccaagaggccaaaaagggcgtcctcattctcagtggatttgcaggtgctgcacagtctctgggtgctggagctattcttgtgaatccttggaacatcacagaagttgctgcctccattggacaagccctaaacatgacagctgaagaaagagagaaaagacatcgccataattttcatcatgtcaaaactcacactgctcaagaatgggctgaaacttttgtcagtgaactaaatgacactgtaattgaggcgcaactacgaattagtaaagtcccaccagagcttccacagcatgatgcaattcaacggtattcaaagtccaacaacaggcttctaatcctgggtttcaatgcaacattgactgaaccagtggataatcaagggagaagaggtgatcaaataaaggagatggatcttaatctacaccctgagcttaaagggcccttaaaggcattatgcagtgatccaagtacaaccatagttgttctgagcggaagcagcagaagtgttttggacaaaaactttggagagtatgacatgtggctggcagcagaaaatgggatgttcctaaggcttacgaatggagagtggatgactacaatgccagaacacttgaacatggaatgggttgatagcgtaaagcatgttttcaagtacttcactgagagaactcccaggtcacactttgaaactcgcgatacttcgcttatttggaactacaaatatgcagatatcgaattcgggagacttcaagcaagagatttgttacaacacttatggacaggtccaatctctaatgcatcagttgatgttgtccaaggaagccgctctgtggaagtccgtgcagttggtgtcacaaagggagctgcaattgatcgtattctaggagagatagtgcatagcaagtcgatgactacaccaatcgattacgtcttgtgcattggtcatttcttggggaaggacgaagatgtttacactttcttcgaaccagaacttccatccgacatgccagccattgcacgatccagaccatcatctgacagtggagccaagtcatcatcaggagaccgaagaccaccttcaaagtcgacacataacaacaacaaaagtggatcaaaatcctcatcatcctctaactctaacaacaacaacaagtcctcacagagatctcttcagtcagagagaaaaagtggatccaaccatagcttaggaaactcaagacgtccttcaccagagaagatctcatggaatgtgcttgacctcaaaggagagaactacttctcttgcgctgtgggtcgtactcgcaccaatgctagatatctccttggctcacctgacgacgtcgtttgcttccttgagaagctcgctgacaccacttcctcacctggccggccaatgactaaccagaatgtcatcgtttccgacaggaaacccatcttgggtttgaaaaccatcactgtctctgtctctaactctcctctgttctctaattcctttcccacttactttaacttccctcgtcgaaagctcttgaaacttcttgaagcagccgacaaaaacaacttagttgttgctccaaagattacgtctatgatcgattccatgcgtgattcttcccctacacgtctcagatcctcttcctatgactctgtttcagataacgacgacaaaacatcttggatcgttcgttttccttcggctttaaatatgtttgatgagattgtgaatgctgcgaaagggaaacagattgtcatgtttcttgattacgacggaactctttctcccatagttgaagatcccgacaaagctttcataacccatgagatgagagaagtcgtaaaagacgtggcttcgaatttcccgactgctattgtcaccgggagatccattgagaaggttcgtagttttgtccaagtaaacgagatttactacgccggaagccacggcatggacattgaaggtccgaccaacgaaaatagtaacggccagagtaatgaaagagtgctattccaacctgctcgtgaatttttaccgatgatcgagaaggtggttaatattttagaggaaaaaacaaaatggatccctggggctatggtggagaacaacaagttttgtctgtccgtacattttcgacgtgttgatgagaagagatggcctgcattagctgaagtagtaaaatcagttcttattgattatccaaagctgaaactaacccaaggtagaaaggtacttgaaatccgccccacaatcaaatgggacaagggccaggcactcaattttttactaaaatcattaggatatgaaaattcggatgatgttgtgccggtgtatatcggggatgaccgtactgacgaagatgcgtttaaggttctacgtgaaaggggacaaggttttgggattcttgtctcaaaagtaccaaaggacaccaatgcctcttattctcttcaagacccttctcaggttaacaagtttctggaacgtttagtagaatggaagaggaagacagtgggagaagagtgaggtaccacccagctttcttgtacaaag

SEQ ID NO: 441 - protein, 1233 aa, Arabidopsis thaliana
MDYNRQRLLVVANRLPVSAVRRGEDSWSLEISAGGLVSALLGVKEFEARWIGWAGVNVPDEVGQKALSKALAEKRCIPVFLDEEIVHQYYNGYCNNILWPLFHYLGLPQEDRLATTRSFQSQFAAYKKANQMFADVVNEHYEEGDVVWCHDYHLMFLPKCLKEYNSKMKVGWFLHTPFPSSEIHRTLPSRSELLRSVLAADLVGFHTYDYARHFVSACTRILGLEGTPEGVEDQGRLTRVAAFPIGIDSDRFIRALEVPEVIQHMKELKERFAGRKVMLGVDRLDMIKGIPQKILAFEKFLEENANWRDKVVLLQIAVPTRTDVPEYQKLTSQVHEIVGRINGRFGTLTAVPIHHLDRSLDFHALCALYAVTDVALVTSLRDGMNLVSYEFVACQEAKKGVLILSGFAGAAQSLGAGAILVNPWNITEVAASIGQALNMTAEEREKRHRHNFHHVKTHTAQEWAETFVSELNDTVIEAQLRISKVPPELPQHDAIQRYSKSNNRLLILGFNATLTEPVDNQGRRGDQIKEMDLNLHPELKGPLKALCSDPSTTIVVLSGSSRSVLDKNFGEYDMWLAAENGMFLRLTNGEWMTTMPEHLNMEWVDSVKHVFKYFTERTPRSHFETRDTSLIWNYKYADIEFGRLQARDLLQHLWTGPISNASVDVVQGSRSVEVRAVGVTKGAAIDRILGEIVHSKSMTTPIDYVLCIGHFLGKDEDVYTFFEPELPSDMPAIARSRPSSDSGAKSSSGDRRPPSKSTHNNNKSGSKSSSSSNSNNNNKSSQRSLQSERKSGSNHSLGNSRRPSPEKISWNVLDLKGENYFSCAVGRTRTNARYLLGSPDDVVCFLEKLADTTSSPGRPMTNQNVIVSDRKPILGLKTITVSVSNSPLFSNSFPTYFNFPRRKLLKLLEAADKNNLVVAPKITSMIDSMRDSSPTRLRSSSYDSVSDNDDKTSWIVRFPSALNMFDEIVNAAKGKQIVMFLDYDGTLSPIVEDPDKAFITHEMREVVKDVASNFPTAIVTGRSIEKVRSFVQVNEIYYAGSHGMDIEGPTNENSNGQSNERVLFQPAREFLPMIEKVVNILEEKTKWIPGAMVENNKFCLSVHFRRVDEKRWPALAEVVKSVLIDYPKLKLTQGRKVLEIRPTIKWDKGQALNFLLKSLGYENSDDVVPVYIGDDRTDEDAFKVLRERGQGFGILVSKVPKDTNASYSLQDPSQVNKFLERLVEWKRKTVGEE

SEQ ID NO: 442 - DNA, 2820 bp, Saccharomyces cerevisiae
atgactacggataacgctaaggcgcaactgacctcgtcttcagggggtaacattattgtggtgtccaacaggcttcccgtgacaatcactaaaaacagcagtacgggacagtacgagtacgcaatgtcgtccggagggctggtcacggcgttggaagggttgaagaagacgtacactttcaagtggttcggatggcctgggctagagattcctgacgatgagaaggatcaggtgaggaaggacttgctggaaaagtttaatgccgtacccatcttcctgagcgatgaaatcgcagacttacactacaacgggttcagtaattctattctatggccgttattccattaccatcctggtgagatcaatttcgacgagaatgcgtggttggcatacaacgaggcaaaccagacgttcaccaacgagattgctaagactatgaaccataacgatttaatctgggtgcatgattaccatttgatgttggttccggaaatgttgagagtcaagattcacgagaagcaactgcaaaacgttaaggtcgggtggttcctgcacacaccattcccttcgagtgaaatttacagaatcttacctgtcagacaagagattttgaagggtgttttgagttgtgatttagtcgggttccacacatacgattatgcaagacatttcttgtcttccgtgcaaagagtgcttaacgtgaacacattgcctaatggggtggaataccagggcagattcgttaacgtaggggccttccctatcggtatcgacgtggacaagttcaccgatgggttgaaaaaggaatccgtacaaaagagaatccaacaattgaaggaaactttcaagggctgcaagatcatagttggtgtcgacaggctggattacatcaaaggtgtgcctcagaagttgcacgccatggaagtgtttctgaacgagcatccagaatggaggggcaaggttgttctggtacaggttgcagtgccaagtcgtggagatgtggaagagtaccaatatttaagatctgtggtcaatgagttggtcggtagaatcaacggtcagttcggtactgtggaattcgtccccatccatttcatgcacaagtctataccatttgaagagctgatttcgttatatgctgtgagcgatgtttgtttggtctcgtccacccgtgatggtatgaacttggtttcctacgaatatattgcttgccaagaagaaaagaaaggttccttaatcctgagtgagttcacaggtgccgcacaatccttgaatggtgctattattgtaaatccttggaacaccgatgatctttctgatgccatcaacgaggccttgactttgcccgatgtaaagaaagaagttaactgggaaaaactttacaaatacatctctaaatacacttctgccttctggggtgaaaatttcgtccatgaattatacagtacatcatcaagctcaacaagctcctctgccaccggatccgctaaatctattaacatggctttgaaattggacaaggaagaaaagtccaatttagaatcaaaattatggaaagaagttcctacaattcaagattggactaataagtttttgagttcattaaaggaaaaggcgtcatctgatgatgatgtggaaaggaaaatgactccagcacttaatagacctgttcttttagaaaactacaagcaggctaagcgtagattattcctttttgattacgatggtactttgaccccaattgtcaaagacccagctgcagctattccatcggcaagactttatacaattctacaaaaattatgtgccgatcctcataatcaaatctggattatttctggtcgtgaccagaagtttttgaacaagtggttaggcggtaaacttcctcaactgggtctaagtgcggagcatggatgtttcatgaaagatgtttcttgccaagattgggtcaatttgaccgaaaaagttgatatgtcttggcaagtacgcgtcaatgaagtgatggaagaatttaccacaaggaccccaggttcattcatcgaaagaaagaaagtcgctctaacttggcattatagacgtaccgttccagaattgggtgaattccacgccaaagaactgaaagaaaaattgttatcatttactgatgacttcgatttagaggtcatggatggtaaagcaaacattgaagttcgtccaagattcgtcaacaaaggtgaaatagtcaagagactagtctggcatcaacatggcaaaccacaggacatgttgaagggaatcagtgaaaaactacctaaggatgaaatgcctgattttgtattatgtctgggtgatgacttcactgacgaagacatgtttagacagttgaataccattgaaacttgttggaaagaaaaatatcctgaccaaaaaaatcaatggggcaactacggattctatcctgtcactgtgggatctgcatccaagaaaactgtcgcaaaggctcatttaaccgatcctcagcaagtcctggagactttaggtttacttgttggtgatgtctctctcttccaaagtgctggtacggtcgacctggattccagaggtcatgtcaagaatagtgagagcagtttgaaatcaaagctagcatctaaagcttatgttatgaaaagatcggcttcttacaccggcgcaaaggtttgaaacaccctttttaacgaaatggttatgactagacagacatcttacgtcttactccttcatgctttatttttttctttgtattgtatttgaacagtcaatatgtggtgttgcgacgaaggcatatatataatagtctcaacc

SEQ ID NO: 443 - protein, 892 aa, Saccharomyces cerevisiae
MTTDNAKAQLTSSSGGNIIVVSNRLPVTITKNSSTGQYEYAMSSGGLVTALEGLKKTYTFKWFGWPGLEIPDDEKDQVRKDLLEKFNAVPIFLSDEIADLHYNGFSNSILWPLFHYHPGEINFDENAWLAYNEANQTFTNEIAKTMNHNDLIWVHDYHLMLVPEMLRVKIHEKQLQNVKVGWFLHTPFPSSEIYRILPVRQEILKGVLSCDLVGFHTYDYARHFLSSVQRVLNVNTLPNGVEYQGRFVNVGAFPIGIDVDKFTDGLKKESVQKRIQQLKETFKGCKIIVGVDRLDYIKGVPQKLHAMEVFLNEHPEWRGKVVLVQVAVPSRGDVEEYQYLRSVVNELVGRINGQFGTVEFVPIHFMHKSIPFEELISLYAVSDVCLVSSTRDGMNLVSYEYIACQEEKKGSLILSEFTGAAQSLNGAIIVNPWNTDDLSDAINEALTLPDVKKEVNWEKLYKYISKYTSAFWGENFVHELYSTSSSSTSSSATGSAKSINMALKLDKEEKSNLESKLWKEVPTIQDWTNKFLSSLKEKASSDDDVERKMTPALNRPVLLENYKQAKRRLFLFDYDGTLTPIVKDPAAAIPSARLYTILQKLCADPHNQIWIISGRDQKFLNKWLGGKLPQLGLSAEHGCFMKDVSCQDWVNLTEKVDMSWQVRVNEVMEEFTTRTPGSFIERKKVALTWHYRRTVPELGEFHAKELKEKLLSFTDDFDLEVMDGKANIEVRPRFVNKGEIVKRLVWHQHGKPQDMLKGISEKLPKDEMPDFVLCLGDDFTDEDMFRQLNTIETCWKEKYPDQKNQWGNYGFYPVTVGSASKKTVAKAHLTDPQQVLETLGLLVGDVSLFQSAGTVDLDSRGHVKNSESSLKSKLASKAYVMKRSASYTGAKV

SEQ ID NO: 444 - DNA, 2970 bp, Saccharomyces cerevisiae
atggcgctctccctcaccaccgccttctcccacctctccctcccctccacctccaagttccacccgctccccctcctccacctccgcttcccctcctcctcctcctcccgccgcgccgcgcgcctcgcgctcgccgcctccgccgccgaggccgccgagcctgtcgaggtggaggaggcgcccgccgaggacggggcggatgaggtggtggccgtggaggacgagctgtccggaccggcgctgcgaaagtacgtgaagcagcggcttcccgggggcttcgcggcgcagcggatcactacggataacgctaaggcgcaactgacctcgtcttcagggggtaacattattgtggtgtccaacaggcttcccgtgacaatcactaaaaacagcagtacgggacagtacgagtacgcaatgtcgtccggagggctggtcacggcgttggaagggttgaagaagacgtacactttcaagtggttcggatggcctgggctagagattcctgacgatgagaaggatcaggtgaggaaggacttgctggaaaagtttaatgccgtacccatcttcctgagcgatgaaatcgcagacttacactacaacgggttcagtaattctattctatggccgttattccattaccatcctggtgagatcaatttcgacgagaatgcgtggttggcatacaacgaggcaaaccagacgttcaccaacgagattgctaagactatgaaccataacgatttaatctgggtgcatgattaccatttgatgttggttccggaaatgttgagagtcaagattcacgagaagcaactgcaaaacgttaaggtcgggtggttcctgcacacaccattcccttcgagtgaaatttacagaatcttacctgtcagacaagagattttgaagggtgttttgagttgtgatttagtcgggttccacacatacgattatgcaagacatttcttgtcttccgtgcaaagagtgcttaacgtgaacacattgcctaatggggtggaataccagggcagattcgttaacgtaggggccttccctatcggtatcgacgtggacaagttcaccgatgggttgaaaaaggaatccgtacaaaagagaatccaacaattgaaggaaactttcaagggctgcaagatcatagttggtgtcgacaggctggattacatcaaaggtgtgcctcagaagttgcacgccatggaagtgtttctgaacgagcatccagaatggaggggcaaggttgttctggtacaggttgcagtgccaagtcgtggagatgtggaagagtaccaatatttaagatctgtggtcaatgagttggtcggtagaatcaacggtcagttcggtactgtggaattcgtccccatccatttcatgcacaagtctataccatttgaagagctgatttcgttatatgctgtgagcgatgtttgtttggtctcgtccacccgtgatggtatgaacttggtttcctacgaatatattgcttgccaagaagaaaagaaaggttccttaatcctgagtgagttcacaggtgccgcacaatccttgaatggtgctattattgtaaatccttggaacaccgatgatctttctgatgccatcaacgaggccttgactttgcccgatgtaaagaaagaagttaactgggaaaaactttacaaatacatctctaaatacacttctgccttctggggtgaaaatttcgtccatgaattatacagtacatcatcaagctcaacaagctcctctgccaccggatccgctaaatctattaacatggctttgaaattggacaaggaagaaaagtccaatttagaatcaaaattatggaaagaagttcctacaattcaagattggactaataagtttttgagttcattaaaggaaaaggcgtcatctgatgatgatgtggaaaggaaaatgactccagcacttaatagacctgttcttttagaaaactacaagcaggctaagcgtagattattcctttttgattacgatggtactttgaccccaattgtcaaagacccagctgcagctattccatcggcaagactttatacaattctacaaaaattatgtgccgatcctcataatcaaatctggattatttctggtcgtgaccagaagtttttgaacaagtggttaggcggtaaacttcctcaactgggtctaagtgcggagcatggatgtttcatgaaagatgtttcttgccaagattgggtcaatttgaccgaaaaagttgatatgtcttggcaagtacgcgtcaatgaagtgatggaagaatttaccacaaggaccccaggttcattcatcgaaagaaagaaagtcgctctaacttggcattatagacgtaccgttccagaattgggtgaattccacgccaaagaactgaaagaaaaattgttatcatttactgatgacttcgatttagaggtcatggatggtaaagcaaacattgaagttcgtccaagattcgtcaacaaaggtgaaatagtcaagagactagtctggcatcaacatggcaaaccacaggacatgttgaagggaatcagtgaaaaactacctaaggatgaaatgcctgattttgtattatgtctgggtgatgacttcactgacgaagacatgtttagacagttgaataccattgaaacttgttggaaagaaaaatatcctgaccaaaaaaatcaatggggcaactacggattctatcctgtcactgtgggatctgcatccaagaaaactgtcgcaaaggctcatttaaccgatcctcagcaagtcctggagactttaggtttacttgttggtgatgtctctctcttccaaagtgctggtacggtcgacctggattccagaggtcatgtcaagaatagtgagagcagtttgaaatcaaagctagcatctaaagcttatgttatgaaaagatcggcttcttacaccggcgcaaaggtttga

SEQ ID NO: 445 - protein, 989 aa, Saccharomyces cerevisiae
MALSLTTAFSHLSLPSTSKFHPLPLLHLRFPSSSSSRRAARLALAASAAEAAEPVEVEEAPAEDGADEVVAVEDELSGPALRKYVKQRLPGGFAAQRITTDNAKAQLTSSSGGNIIVVSNRLPVTITKNSSTGQYEYAMSSGGLVTALEGLKKTYTFKWFGWPGLEIPDDEKDQVRKDLLEKFNAVPIFLSDEIADLHYNGFSNSILWPLFHYHPGEINFDENAWLAYNEANQTFTNEIAKTMNHNDLIWVHDYHLMLVPEMLRVKIHEKQLQNVKVGWFLHTPFPSSEIYRILPVRQEILKGVLSCDLVGFHTYDYARHFLSSVQRVLNVNTLPNGVEYQGRFVNVGAFPIGIDVDKFTDGLKKESVQKRIQQLKETFKGCKIIVGVDRLDYIKGVPQKLHAMEVFLNEHPEWRGKVVLVQVAVPSRGDVEEYQYLRSVVNELVGRINGQFGTVEFVPIHFMHKSIPFEELISLYAVSDVCLVSSTRDGMNLVSYEYIACQEEKKGSLILSEFTGAAQSLNGAIIVNPWNTDDLSDAINEALTLPDVKKEVNWEKLYKYISKYTSAFWGENFVHELYSTSSSSTSSSATGSAKSINMALKLDKEEKSNLESKLWKEVPTIQDWTNKFLSSLKEKASSDDDVERKMTPALNRPVLLENYKQAKRRLFLFDYDGTLTPIVKDPAAAIPSARLYTILQKLCADPHNQIWIISGRDQKFLNKWLGGKLPQLGLSAEHGCFMKDVSCQDWVNLTEKVDMSWQVRVNEVMEEFTTRTPGSFIERKKVALTWHYRRTVPELGEFHAKELKEKLLSFTDDFDLEVMDGKANIEVRPRFVNKGEIVKRLVWHQHGKPQDMLKGISEKLPKDEMPDFVLCLGDDFTDEDMFRQLNTIETCWKEKYPDQKNQWGNYGFYPVTVGSASKKTVAKAHLTDPQQVLETLGLLVGDVSLFQSAGTVDLDSRGHVKNSESSLKSKLASKAYVMKRSASYTGAKV

SEQ ID NO: 446 - protein, 723 aa, Anaeromyxobacter dehalogenans
MSRVVIVSNRLPVTVERVEDGVRVVPSVGGLATGLRRPHEQGGGPWVGWPGDLGGLEPEQVARVEARLSDLRLVPVHLTQEEVQRYYQDYSNGLLWPVFHSFLGEVPLEMGGAAEYERVNARFADAVAATARPGDVIWIHDYQLLRLPALLRERLPDARIGFFLHIPFPSSDVFRVLPNREALLEGMLGADLIGFHTASYMRHFSSSVLRVLGAWTDVDRIRWRGREVRIGVFPMGVDAADFAGTAHTAEVEEEFRGLRQDGTHLLVGIDRLDYTKGIPRRLLAYERLLREHPELRGKVRLVQVAVPSRTEVGAYQQFREQVDGLVGRIHGAFATPTWSPIHYLSRGLSRPQVVALYRAADVMLVTPIRDGMNLVAKEFVAVRGDGDGVLVLSEFTGAAAELAEAVQVNPYDAEGTAAAILRALEMPEDERRTRMAGLRRRVTRYDVHWWARTFLDRLRAPAAATPPHGLEVSARPAVEGARARLRAAPHATLLLDYDGTLVPFAPTPELARPDRELRDLLRELARHPGYSVHLVTGRQRDTVDRWFGDLGIGLHAEHGYWSKLPGTAWQLAASVSTAWREPARAILEEFAARTPGSLVEEKSAGFAWHYRTADPDFGAAQAHDLMLHLSTVLSNAPVEILPGALVVEVRPQGVDKGKVVARAAAASPEGSLLAAFGDDRTDEDMFAALPPGAISIHVGPAPSRATLRLAGVPESRAFLRGLL

SEQ ID NO: 447 - protein, 750 aa, Bacteroides vulgatus
MKLYIISNRLPVKAVAEQDTFVFSRSEGGLTTGLNSLQGNYEKHWVGWPGICTDKEEEKQDICHRLEEMNLHPIFLSDEQYKNYYEGYSNSTLWPLCHYFFAYTLYRKSFWQSYQEVNALFCREIIRLVEPDDWVWVQDYQLMLLPEMLRQELPRLHIGYFHHIPFPSYELFRILPERAEILKGLLGADFIAFHTHDYMRHFISAAERVLHMDFSLDETRIGSRIVRVDALPMGINYDLYHNVSQQKNVWKAIERTRLLFGKHKLILSVDRLDYSKGILHRLYGFASFLEHHPEYHGKVTLAMVIVPSRDHVGSYAELKTRIDEEIGSINGRYSTMNWTPVCYFYHGFSFEELAAMYFIADIALVTPLRDGMNLVAKEYIAVKQDNPGVLVLSEMAGAAVELTDALLVNPNDTEQIENAICRALEMPFEEQKERMHRMQSIVSVQTVNKWAADFVNEWQEVAHKNKTMLLKKIGSQNMQEIQHQYLHAKKRLILLDYDGTLVPFQKRPEDASPTPQLLDTLQKLTADPLNHVVINSGRDHFTLEKWLGALPISFAAEHGAFYKENGVWHKNVHAQEWSPGLLSILKLFVSKTPRSHLEVKETALAWHYRETDAWLGRLRAQQLVNSLISICLKQNLQIMQGNKVIEIKSPEFTKGSEVNRLLLATRYDFILAMGDDTTDDDMFKALPVTAVTVKIGTASESARYNLPVQTDTLPFLQRLTDKSVVKAALKSGLKGQLSSAIDFLKRIINH

SEQ ID NO: 448 - protein, 733 aa, Cytophaga hutchinsonii
MNDEKRLIIVAYRIPFKVTFKESGERVLQQNSGGLVSAILSLAEKGDVFGKNQKIHWFGYSTPDILQEGETQVENENFIVHPVLIEDALNDAYYEGFCNSTIWPISHYYPYLTSFNEEDYEAYVKANKIFADQINAFIRPGDMVWIQDYQLMLLPGMLRSENPDASIGYFHHIPFATFEIFRLLPKQWQTELLKGMIGADLVGFHTNDYSQYFLRSVQRVLGYDTTARDISIPNRIVRVDTFPISIDYNKFQELYNDPGVIEKRKEFLKDLSAEKNIFSVDRLDYSKGLIHRLNGFEYFLDQYPQWHTRVVLTMIVVPSRETILKYAEMKHELEEAVGRINGKYGTLGWRPVIYLYRSLSFEELGALYTLADVALITPIRDGMNLVAKEFVATRTDKKGVLILSEMAGASLELNGAILINPTDKRTLAAAIIQALTMDEQEQTQRMQMMQDRIRVYDIFKWTEDYMDQLDIIKLKQMEFEEKIINQDVLKSFKQIFDESSRRLFLLDYDGTLSPIVPDPSSSKPSVGIVDVLKKLSSDFNVNVAIISGRDKEFLNYIFDPNTILSAEHGAFLRIPGQDWELQYDYNDQWKRSVLPVFQKYTDRCAGSFIENKSTSLAWHYRNTEKEYAHIRSREFIEELENKVGIKSNLAIIDGDKVIEMKPSDVDKGIAARKICDLYQPDFILSIGDDRTDEDMFKALPDNALTIKVGVKNSSAKFTIKTQEEVMTILNTFL

SEQ ID NO: 449 - protein, 722 aa, Myxococcus xanthus
MSRLLLVSNRLPVTVKVEKDTVSVVRSAGGLATGLRRPHERSGGLWIGWPGDVSRLSESQRARVDAQLAELRCVPLTLSASEVSRYYEGYSNRVLWPLCHYMLERIPRQDRDWEVYRKVNERFADLVAKHYEPGDTIWVHDYQLMLVPGMLRQRLPGARIGYFHHIPFPSSEIFSTLPRRRELLKGLLGADLIGFHTVSYVRHFSGALLRHLGLDTDIDRIIWEGRDVRVGAFPMGIDAQAFESIASEPGMQEEVANLRRSSEGQRILLGIDRLDYTKGIPRRLLAVQRVLERTPAWRGRLRFIQVTVPSRTQVEAYANYRELVNELVGRINGLYGTVHNVPVHYLYRSFNERQLVGLYRGADVMLVTPVRDGMNLVAKEFCAARPDDDGVLVLSEFAGAAAELGGALIVNPYDVDAMADAIEKALGMAEEERRTRMHTLRKQVKSRDVHWWTSSFLDRLQSLPAVDVRAEASAPEALAQMKQVERLQLLLDYDGTLVGYAPRPELAAPDAALKELLAKLVARPGISVSIVSGRPKETLEEWLGDLAMGLYAEHGLWSRPAPGEAWRMLEGVTFDWKERVRPELETFSARVPGSFVEEKTASLAWHYRLVDAEFGAIQSRELRLYLAEKFAGQSMDILPGDKVVEIRPRGVHKGRVVGEATKDAAPGALVVAIGDDRTDEDLFASIPPGGLTIHAGNKPTRAAFRVNGPDEVRALLAGLLEP

SEQ ID NO: 450 - protein, 745 aa, Parabacteroides distasonis
MRLFIISNRLPVKVTRSSDGKFVFSRSEGGLATGLKSLDVDCEKHWIGWPGVCVEQKTEKDDICSQLEKNNYHPVFLSDRQYENYYEGYSNSTLWPLCHYFFAYTLYKKNFWESYREVNAVFCEEISRIVEPNDWVWVQDYQLMLLPGMLREKFPNLHIGYFHHIPFPSHELFRILPERVEILNGLLGADFVAFHIHDYMRHFISATERILHKNFNLDEVQMNDRVTRVDALPMGINYDLYHNVIADDKVHHAVEKTRLLFGDHKLIISVDRLDYSKGILHRLYGFASFLKNHPEYHGKVTLAMVIVPSRDHVGSYAELKTKIDEEIGSINGTYSTMNWTPVCYFYHGFSFEELVAMYYVADIALVTPLRDGMNLVAKEYVATKQDNPGVLILSEMAGASVELSDALLINPNDTDQIEQAICRALKMPLEEQRERLQRMQAILSVQTVNKWAADFMREWRQAAEKNKRLQKKKISAQDQNEIKTLYDQAKKRLILLDYDGTLTAFKNHPEDAAPTPALRDLLQRFCSDSRNHVTINSGRDHYTLEKWLGDLPLSFAAEHGAFYKEKGAWHKNIGNREWDSELLFILNLFVSKTPYSHLETKEAALAWHYRESDAWLGELRAQQLTKAIMPVCLRKGLQIMQGNKVVEIKSPEYTKGSEVDRLLLASRYDFILAMGDDTTDEDMFRALPVSAITVKVGIVSEKAKYNLSSQEEVLPFLEELSGEGVSYGTTSRSIKGQLKATVDFF

SEQ ID NO: 451 - protein, 949 aa, Aspergillus fumigatus
MAANQDTPTKVPDGQPNPVMVGPGMKSLGEEAYTNASNATPSLETDKKHPLVNDAPSYFSQVPGTKQSSTVSDTALPGSPADAARDAKSPIELLRRLSLGRSPMIPDVDPREQYPGLNLTGRIISAAFCIPYKVGYRPGSDWDLKPRPGTSALFDSFAYLGSGETKWSHTLVGWTGEVEPIQDVSVPLQHIPVSSGARLPPALNGVAVPLNKAAAPVPVDSKQRPPSHPLLEGFRVSQEDRARLDAQLSSGRYGKIAPVWLSDESEEPEESSIFLEDQGRWRRYAEKELYPLLHYKQHGPTDGRSERKWWGDYVRMNRLFADRIIEEYQEGDIVWIHDYHLFLLPSLLRQRIPNIYIGFFLHAPFPSSEFMRCLAKRKEVLTGVLGANMIGFQTFSYSRHFSSCCTRVLGFDSNNAGVDAYGAHVAVDVFPIGIDVKAIQKAAYGYPEIEEAVVGLRTLYAGKKIIVGRDRLDSVRGVAQKLQAFEQFLERYPEWREKVVLIQVTSPTSVEEEKEDPENKIASQISNLVSTINGRFGSISFSPVKYYPQYLSQHEYFALLRVADVGLITTVRDGMNTTSLEYILCQHNTHGPLILSEFSGTAGTLSSAIHINPWDTTGVAEAINRALTMSPEEKKAQHVKLYKHVTTNTISTWSNHFVTRLLTNLSSFDQSVATPALDRAKLLKQYRKARKRLFMFDYDGTLTPIVKDPQAAIPSDRVLRTLKTLAADPRNAVWIISGRDQAFLDEWMGHIPELGLSAEHGCFIRQPRSDDWENLAESSDMGWQKEVMEVFQHFTERTQGSFIERKRVALTWHYRRADPEYGAFQARECRKMLEETVAKRWEVEVMAGKANLEVRPTFVNKGFIAARLVQEYGTDPAQAPEFVLCLGDDFTDEDMFRALKKSGLPAGHVFSVTVGASSKQTEASWHLLEPADVIGTISMLNNSSSAQEY

SEQ ID NO: 452 - protein, 940 aa, Aspergillus terreus
MSSPPHNSPPTIVAGMQPGTVKIESDTNRAAPSSNASGFPFPPIPEHDQPPPLSSAESKSPAPTEPITPATPAQAAQNAKSGMELLRRLSLQGTPTVLEMDPKEQHPGLNLTGRIISAAFCIPYKVYYRSGGDWELKPRPGTSALFDSFAYLGSEETRWSHTLVGWTGEVEPVEEDVVPLQHIPVNTSAKLPTAVNGTGLALNKAAAPVPVDAHQRPPSHPLLDGFSIGPKDRERLDQQLSSGRYGKIAPVWLSAESEVPDDSIFLEDQGRWRRYAERELYPLLHYKQHGPTDGRSEIKWWTDYVRMNRLFADRIVKEYQEGDIVWIHDYHLFLLPSMLRQRIPNIYIGFFLHAPFPSSEFMRCLAKRKEVLTGVLGANMIGFQTFSYSRHFSSCCTRVLGFDSNSAGVDAYGAHVAVDVFPIGIDVKALQRKAFGSPEIEKAVEGIRKLYEGKKIIVGRDRLDSVRGVAQKLQAFEVFLERYPEWRDKVVLIQVTSPTSVDEEKEENKIAAQISNLVSTIHGRFGSLSFSPVKYYPQYLSQDEYFALLRTADVGLITTVRDGMNTTGLEYIICQQNNYGPLILSEFSGTAGTLSSAIHINPWDTAGVADAINQALTMPEDLRRMQHQKLYKHVITNTVATWSKQFLTRLLTNLSSFDQSVATPALDRAKLVKQYRKARRRLFMFDYDGTLTPIVKDPQAAIPSDRVLRTIKSLAADPRNDVWIISGRDQAFLDEWMGHIPELGLSAEHGCFIRKPHSDDWENLAERSDMGWQKEVMETFQHYTERTQGSFIERKRVALTWHYRRADPEYGAFQARECRRQLEETVGRKWEVEVMAGKANLEVRPTFVNKGFIATRLVNEYGHGPGKAPEFIFCSGDDFTDEDMFRALRKFDLPQDHVYSVTVGASSKQTAASWHLLEPADVIETISMLNSSSSQEYRTQ

SEQ ID NO: 453 - protein, 888 aa, Candida albicans
MAPQQVNAFSANGSIPSPKEFEGKGKLKLSGRILNVMTSLPLQIISDYDNKTGQYYWDVETVRGNSALYSSQHFLAENKEWETHLIAWTGELINKKKDTSSLTADTLQDDPLYLDEEDKSKIEKKLCDASGTPNIHPVWLLRRDQGRWRKYAENVLWPVFHYIQGQPSDGKAETDAWHDYVKFNEAYLNKIKSVYKPGDIIWIHDYYLLLLPQLLRMEFPNAYIGFFLHVPFPSSEYFRCLSKRSQLLDGMLGADKIGFQSDSFQRHFISCCARVLGCEVNRDSVSAYGTTISVETLPIGIDTEKIEHDAFSSELGVEEKVQALKQVYKGKKLIVGRDRLDKVRGVIQKLEGFEIFLDMYPEWRETVVLIQVSSPGYSHSANVETRVTEIISRINSKYGNLNHTPVLHYQMRVAKEEYLALLRVADLALITSVRDGMNTTSLEFVICQKYNNSPLILSEFTGTATVLKDAIMVNPWDSVGVAKTINDALMLSTKEKVSLESKLYEKVLSNTVQNWTSTFICDILSHSIVTHSNSYTPALNRPLLLNNYKESQRRLFLFDYDGTLTPIVQDPAAAIPSDKLNRILDVLSSDPKNQIWIISGRDQAFLEKWMGNKNVGLSAEHGCFMKDIGSKEWVNLAASFDMSWQEKVDDIFKYYTEKTPGSNIERKKVALTWHYRRADPDLGNFQAEKCMKELNDTVAKEYDVEVMAGKANIEVRPKFVNKGEIVKRLVLHPHGAKQEKHPTGHCTKDIPIEELPDFMLCLGDDLTDEDMFNSLNEINKKWKGDNRPTNKFGSYGVYPVAVGPASKKTVAIAHLNEPRQVLETLGLLAGLVSIFESAGTVDLDDRGHLANSVSSERSKHAVSKAVSLRKKASQEKEIVKEDPTNGAK

SEQ ID NO: 454 - protein, 877 aa, Pichia stipitis
METKFAYPSDSTIISPADYANNSKIKLSGRVLNVMTSLPSQIYKCHDPKTHEYIWDVEPVRGNSALYSSQYFLDQHTDWETHLIAWTGELINNTNLSANGENIQDDPLYLDDKEKQELEKKLRKANNSDNIHPVWLLRRDQERWRKYAENVLWPVFHYIQGQPSNGKAEADAWHDYVKFNEVYCNKIKSVYKPGDIIWIHDYYLLLLPQLLRMEFPDAYIGLYVHAPFPSSEYFRCLSKRSQLLDGMLGADKIAFQSDSFQRHFLSCCSRLLGYEVTSNKILAYGTAISVETLPIGIDTKKTENDAFEPGIEVKVKALKEIYTGKKIIVGRDRLDKVRGVVQKLQAFEMFLQMYPEWRDKVVLIQVSSPGYSHSANVEKKVTELVNRINSQFGNLNYTPVLHYQIRIEKDEYFALLRVADLALVTSVRDGMSTTSLEFVICQKENSSPLILSEFTGTASVLRESILVNPWDSVGIARTINDCLSMSDDAKTDLEGRLYKQVISNTIQSWSSTFLSHLIEHVSETHTFHYTPALNRPLLYNSYAKSERRLFLFDYDGTLTPIVKDPAAAIPSSRLNQILDALSADPKNQIWVISGRDQAFLDKWLGSKNVGFSAEHGCFMKDIDSKEWVNLAESFDMSWQQKVDSVYRYYTERTPGSNIERKKVALTWHYRRADPELGRFQAAKCFQQLKDTVAKEYDVEIMEGKANIEVRPKFLNKGEIVRRLVLNPHGSKLDTHISSKGSADISVADLPDFILCLGDDLTDEDMFRALKEIEDDWTSKEFPKNQFGSYGVYPVAVGPASKQTIATSHLNEPSQVLETLGLLAGQVSLFESAGTVDLDDRGHVANSPSSERSKTAIKEAALRRKVSLSKVIESKEKI

SEQ ID NO: 455 - DNA, 294 bp, Artificial sequence
  Rbcs chl targeting signalling
atggcgctctccctcaccaccgccttctcccacctctccctcccctccacctccaagttccacccgctccccctcctccacctccgcttcccctcctcctcctcctcccgccgcgccgcgcgcctcgcgctcgccgcctccgccgccgaggccgccgagcctgtcgaggtggaggaggcgcccgccgaggacggggcggatgaggtggtggccgtggaggacgagctgtccggaccggcgctgcgaaagtacgtgaagcagcggcttcccgggggcttcgcggcgcagcggatc

SEQ ID NO: 456 - protein, 98 aa, Artificial sequence
  Rbcs chl targeting signalling
MALSLTTAFSHLSLPSTSKFHPLPLLHLRFPSSSSSRRAARLALAASAAEAAEPVEVEEAPAEDGADEVVAVEDELSGPALRKYVKQRLPGGFAAQRI

SEQ ID NO: 457 - DNA, 2194 bp, Oryza sativa; identical to SEQ ID NO: 91

SEQ ID NO: 458 - protein, 50 aa, Artificial sequence
  motif 29: Class I - motif I
  VARIANT (2)..(2): / replace = "Gln"
  VARIANT (7)..(7): / replace = "Ile"
  VARIANT (19)..(19): / replace = "Gln"
  VARIANT (20)..(20): / replace = "Tyr"
  VARIANT (23)..(23): / replace = "Asp"
  VARIANT (24)..(24): / replace = "His"
  VARIANT (25)..(25): / replace = "Asp"
  VARIANT (26)..(26): / replace = "Ile" / replace = "Asn"
  VARIANT (27)..(27): / replace = "Asn"
  VARIANT (44)..(44): / replace = "His"
  VARIANT (45)..(45): / replace = "Lys"
YEEGDVVWCHDYHLMFLPKCLKEYNSKMKVGWFLHTPFPSSEIYRTLPSR

SEQ ID NO: 459 - protein, 50 aa, Artificial sequence
  motif 30: Class I - motif II
  VARIANT (2)..(2): / replace = "Lys"
  VARIANT (15)..(15): / replace = "His"
  VARIANT (16)..(16): / replace = "Ser"
  VARIANT (20)..(20): / replace = "Phe"
  VARIANT (25)..(25): / replace = "Glu"
  VARIANT (34)..(34): / replace = "Ala"
  VARIANT (39)..(39): / replace = "Leu"
  VARIANT (45)..(45): / replace = "Ala"
FEYFTERTPRSHFETRETSLVWNYKYADVEFGRLQARDMLQHLWTGPISN

SEQ ID NO: 460 - protein, 50 aa, Artificial sequence
  motif 31: Class I - motif III
  VARIANT (15)..(15): / replace = "Tyr"
  VARIANT (26)..(26): / replace = "Ala"
  VARIANT (27)..(27): / replace = "Asn"
  VARIANT (35)..(35): / replace = "Val"
  VARIANT (43)..(43): / replace = "Asn"
GVDRLDMIKGIPQKILAFEKFLEENPEWRDKVVLLQIAVPTRTDVPEYQK

SEQ ID NO: 461 - protein, 50 aa, Artificial sequence
  motif 32: Class I-II - motif I
  VARIANT (2)..(2): / replace = "Trp"
  VARIANT (6)..(6): / replace = "Thr"
  VARIANT (19)..(19): / replace = "Ser"
  VARIANT (21)..(21): / replace = "Glu" / replace = "Ser"
  VARIANT (23)..(23): / replace = "Ile"
  VARIANT (25)..(25): / replace = "Lys"
  VARIANT (26)..(26): / replace = "Ser"
  VARIANT (27)..(27): / replace = "Val"
  VARIANT (30)..(30): / replace = "Cys"
  VARIANT (33)..(33): / replace = "Val"
  VARIANT (38)..(38): / replace = "Tyr"
  VARIANT (45)..(45): / replace = "Val"
  VARIANT (47)..(47): / replace = "Ala"
  VARIANT (49)..(49): / replace = "Thr"
GFFLHSPFPSSEIYRTLPVRDELLRALLNADLIGFHTFDYARHFLSCCSR

SEQ ID NO: 462 - protein, 50 aa, Artificial sequence
  motif 33: Class I-II - motif II
  VARIANT (1)..(1): / replace = "Tyr"
  VARIANT (2)..(2): / replace = "Ala"
  VARIANT (4)..(4): / replace = "Arg"
  VARIANT (5)..(5): / replace = "Thr"
  VARIANT (6)..(6): / replace = "Leu"
  VARIANT (7)..(7): / replace = "Leu" / replace = "Ile"
  VARIANT (12)..(12): / replace = "Arg"
  VARIANT (13)..(13): / replace = "Leu"
  VARIANT (15)..(15): / replace = "Met"
  VARIANT (16)..(16): / replace = "Ile"
  VARIANT (20)..(20): / replace = "Pro"
  VARIANT (21)..(21): / replace = "Gln"
  VARIANT (23)..(23): / replace = "Ile"
  VARIANT (26)..(26): / replace = "Met"
  VARIANT (28)..(28): / replace = "Lys"
  VARIANT (29)..(29): / replace = "Phe"
  VARIANT (32)..(32): / replace = "Glu"
  VARIANT (33)..(33): / replace = "Asn"
  VARIANT (35)..(35): / replace = "Lys"
  VARIANT (36)..(36): / replace = "Leu"
  VARIANT (37)..(37): / replace = "Gln"
  VARIANT (38)..(38): / replace = "Asp"
  VARIANT (39)..(39): / replace = "Arg"
  VARIANT (40)..(40): / replace = "Ala"
  VARIANT (43)..(43): / replace = "Leu"
  VARIANT (47)..(47): / replace = "Val"
  VARIANT (49)..(49): / replace = "Thr"
FKGKKVMLGVDDMDIFKGISLKLLAFEQLLEQHPEWRGKVVLVQIANPAR

SEQ ID NO: 463 - protein, 29 aa, Artificial sequence
  motif 34: Class I-II - motif III
  VARIANT (2)..(2): / replace = "Leu"
  VARIANT (4)..(4): / replace = "Thr"
  VARIANT (5)..(5): / replace = "Val"
  VARIANT (6)..(6): / replace = "Thr"
  VARIANT (7)..(7): / replace = "Asp"
  VARIANT (8)..(8): / replace = "Val"
  VARIANT (9)..(9): / replace = "Val"
  VARIANT (10)..(10): / replace = "Val"
  VARIANT (12)..(12): / replace = "Asn"
  VARIANT (13)..(13): / replace = "Ser"
  VARIANT (14)..(14): / replace = "Leu"
  VARIANT (21)..(21): / replace = "Ile"
  VARIANT (22)..(22): / replace = "Ser"
  VARIANT (25)..(25): / replace = "Phe"
  VARIANT (26)..(26): / replace = "Val" / replace = "Thr"
  VARIANT (27)..(27): / replace = "Ala"
  VARIANT (29)..(29): / replace = "Gln"
AYYAIAECCLVTAVRDGMNLVPYEYIVCR

SEQ ID NO: 464 - protein, 50 aa, Artificial sequence
  motif 35: Class III - motif IV
  VARIANT (19)..(19): / replace = "Glu"
  VARIANT (25)..(25): / replace = "Val"
  VARIANT (27)..(27): / replace = "Thr"
  VARIANT (28)..(28): / replace = "Glu"
  VARIANT (29)..(29): / replace = "Lys"
  VARIANT (32)..(32): / replace = "Arg"
  VARIANT (33)..(33): / replace = "Thr"
  VARIANT (35)..(35): / replace = "Lys"
  VARIANT (36)..(36): / replace = "Gly"
  VARIANT (37)..(37): / replace = "Leu"
  VARIANT (39)..(39): / replace = "Arg"
  VARIANT (40)..(40): / replace = "Cys"
  VARIANT (47)..(47): / replace = "Thr"
GKQIVMFLDYDGTLSPIVDDPDRAFMSDEMREAVRKVAKHFPTAIVSGRC

SEQ ID NO: 465 - protein, 32 aa, Artificial sequence
  motif 36: Class III - motif V
  VARIANT (6)..(6): / replace = "Phe"
  VARIANT (8)..(8): / replace = "Val"
  VARIANT (11)..(11): / replace = "Ser"
  VARIANT (29)..(29): / replace = "Tyr"
  VARIANT (30)..(30): / replace = "Glu"
  VARIANT (32)..(32): / replace = "Ser"
QGRKVLEIRPTIKWDKGKALEFLLESLGFANC

SEQ ID NO: 466 - protein, 29 aa, Artificial sequence
  motif 37: Class III - motif VI
  VARIANT (2)..(2): / replace = "Val"
  VARIANT (24)..(24): / replace = "Ile"
PIYIGDDRTDEDAFKVLRNRGQGFGILVS

SEQ ID NO: 467 - protein, 8 aa, Artificial sequence
  motif 38: Class III - motif VII
  VARIANT (2)..(2): / replace = "Ala"
  VARIANT (3)..(3): / replace = "Val"
  VARIANT (4)..(4): / replace = "Thr"
  VARIANT (5)..(5): / replace = "Trp"
  VARIANT (7)..(7): / replace = "Phe"
FCLSVHYR

SEQ ID NO: 468 - protein, 5 aa, Artificial sequence
  motif 39: Class III - motif VIII
LDYDG

SEQ ID NO: 469 - protein, 6 aa, Artificial sequence
  motif 40: Class III - motif IX
GDDRTD

SEQ ID NO: 470 - protein, 36 aa, Artificial sequence
  from Arabidopsis thaliana P450 protein (AEB16913, SEQ ID NO: 282)
MESSLFSPSSSSYSSLFTAKPTRLLSPKPKFTFSIR

SEQ ID NO: 471 - protein, 72 aa, Artificial sequence
  transit peptide from Arabidopsis COS1 (COI1 suppressor 1)
MKSLASPPCLRLIPTAHRQLNSRQSSSACYIHGGSSVNKSNNLSFSSSTSGFASPLAVEKELRSSFVQTAAV

SEQ ID NO: 472 - protein, 62 aa, Artificial sequence
  transit peptide from tomato rubisco small subunit (AAM50960)
MASSVISSAAVATRSNVTQASMVAPFTGLKSSATFPVTKKQNLDITSIASNGGRVSCMQVWH

SEQ ID NO: 473 - protein, 49 aa, Artificial sequence
  transit peptide from corn SSU (AEE66528)
MAPTVMMASSATAVAPFLGLKSTASLPVARRSSRSLGNVSNGGRIRCMQ

SEQ ID NO: 474 - protein, 32 aa, Artificial sequence
  transit peptide from corn AS1
MATASLALSLRLAPSSRPLSLRRRGAAGVTCR

SEQ ID NO: 475 - protein, 47 aa, Artificial sequence
  transit peptide from AS2
MESLAATSVFAPSRVAVPAARALVRAGTVVPTRRTSSRSGTSGVKCS

SEQ ID NO: 476 - protein, 69 aa, Artificial sequence
  transit peptide from spinach (AAY97391)
MALSTSLSLVSPKLSQQNLTFCTFNNQPSSLNGHIKFNPNLRNSVSKLFITTQNTRFLKFRYVRNQINS

SEQ ID NO: 477 - protein, 73 aa, Artificial sequence
  transit peptide from Ipomoea batata ADP-glucose phosphorylase
MAAATIGALSSPYTGGVGERIDGDVSKASFRRLSFASSHLSGDKLMPLPPRRLRSGGKSSEVRTAPFIVSPKA

SEQ ID NO: 478 - protein, 48 aa, Artificial sequence
  Transit peptide from rice SGR (stay green gene, Os09g0532000)
MAAATSTMSLLPPITQQQRWHAADSLVVLASRCHNSRRRRRCRYVVPR

SEQ ID NO: 479 - protein, 56 aa, Artificial sequence
  transit peptide from soybean rubisco small subunit precursor (AAA82069)
MASSMISSPAVTTVNRAGAGMVAPFTGLKSMAGFPTRKTNNDITSIASNGGRVQCM

SEQ ID NO: 480 - protein, 54 aa, Artificial sequence
  transit peptide from Populus alba isoprene synthase (ABV04402)
MATELLCLHRPISLTHKLFRNPLPKVIQATPLTLKLRCSVSTENVSFTETETEA

SEQ ID NO: 481 - protein, 89 aa, Artificial sequence
  modified transit peptide for chloroplast targeting (CAA48415)
MASSMLSSATMVASPAQATMVAPFNGLKSSAAFPATRKANNDITSITSNGGRVNCMQVWPPIGKKKFETLSYLPDLTDSGGRVNCMQAM

SEQ ID NO: 482 - protein, 54 aa, Artificial sequence
  transit peptide from Arabidopsis RbcS-TP
MASSMLSSATMVASPAQATMVAPFNGLKSSAAFPATRKANNDITSITSNGGRVN

SEQ ID NO: 483 - protein, 59 aa, Artificial sequence
  transit peptide from Arabidopsis E1alpha subunit of pyruvate dehydrogenase
MATAFAPTKLTATVPLHGSHENRLLLPIRLAPPSSFLGSTRSLRRLNHSNATRRSPVVS

SEQ ID NO: 484 - protein, 70 aa, Artificial sequence
  transit peptide from pea carbonic anhydrase
MSTSSINGFSLSSLSPAKTSTKRTTLRPFVFASLNTSSSSSSSSTFPSLIQDKPVFASSSPIITPVLREE

SEQ ID NO: 485 - protein, 71 aa, Artificial sequence
  Transit peptide from Flaveria pringlei CA3
MYATAAAFAPSFTTSRRKPSSSSSTVSTCFARLSNSAQSSSSSATPPPSLIRNQPVFAAPTPIITPTVRGD

SEQ ID NO: 486 - protein, 88 aa, Artificial sequence
  88 aa non canonical TP from Pea
MHSVIKGGWRPTFALAKKNDSQERKTRIRLSKDKRKAMVESFIKKYQESNGGNFPPITVTHKEVGGSFYTVREIVREVIQENRVLGPA

SEQ ID NO: 487 - protein, 63 aa, Artificial sequence
  transit peptide from Arabiodpsis BCCP
MASSSSFSVTSPAAAASVYAVTGTSSHFPIQNRSRRVSRFRLSAKPKLRFLSKPSRSSYPVVK

SEQ ID NO: 488 - protein, 71 aa, Artificial sequence
  transit peptide from Arabiodpsis GLU2
MALQSPGATGASSSVSRLLSSAKLSSTKTIFSVDFVRSYCISKGTKRRNELSGFRGYSPLLKSSLRSFSVK

SEQ ID NO: 489 - protein, 29 aa, Artificial sequence
  transit peptide from ATP synthase delta subunit protein of Bigelowiella natans (chlorarachniophyte algae)
HVGSAIVRTPTSTFSMPSIRTPMMGRNLR

SEQ ID NO: 490 - protein, 50 aa, Artificial sequence
  transit peptide from  Fdx1 of Bigelowiella natans (chlorarachniophyte algae)
DQQLGAGLAMRAPAVGARVLRTPGNQCLRVSGKNPFSRVAVSAIHAPMTA

SEQ ID NO: 491 - protein, 60 aa, Artificial sequence
  Transit peptide from  RpL28 of Bigelowiella natans (chlorarachniophyte algae)
ALVSFRTSTTGGENLEAVMSTISRNVAVNGRRNQIASGRRCGLTGKSGTTAYKYCFSHKR

SEQ ID NO: 492 - protein, 12 aa, Artificial sequence
  motif 1
  VARIANT (1)..(1): / replace = "Cys" / replace = "Ala" / replace = "Gly" / replace = "Pro"
  VARIANT (2)..(2): / replace = "Tyr" / replace = "Pro" / replace = "Gly"
  VARIANT (3)..(3): / replace = "Val" / replace = "Met"
  VARIANT (4)..(4): / replace = "Asn"
  VARIANT (10)..(10): / replace = "Val" / replace = "Leu"
  VARIANT (11)..(11): / replace = "Ala" / replace = "Phe" / replace = "Ile" / replace = "Val"
SHIESLDYEINE

SEQ ID NO: 493 - protein, 12 aa, Artificial sequence
  motif 1
  VARIANT (1)..(1): / replace = "Ala" / replace = "Gly" / replace = "Pro"
  VARIANT (2)..(2): / replace = "Tyr" / replace = "Pro" / replace = "Gly"
  VARIANT (3)..(3): / replace = "Val" / replace = "Met"
  VARIANT (4)..(4): / replace = "Asn"
  VARIANT (10)..(10): / replace = "Val" / replace = "Leu"
  VARIANT (11)..(11): / replace = "Ile" / replace = "Val"
SHIESLDYEINE

SEQ ID NO: 494 - protein, 19 aa, Artificial sequence
  motif 2
  VARIANT (2)..(2): / replace = "Ala" / replace = "Ser"
  VARIANT (6)..(6): / replace = "Ser"
  VARIANT (11)..(11): / replace = "Ile"
  VARIANT (13)..(13): / replace = "Gly"
  VARIANT (18)..(18): / replace = "Val"
PTAAGPGIPEVKAYLNGID

SEQ ID NO: 495 - protein, 18 aa, Artificial sequence
  motif 3
  VARIANT (2)..(2): / replace = "Cys" / replace = "Asn"
  VARIANT (4)..(4): / replace = "Cys" / replace = "Phe" / replace = "Ala" / replace = "Ser" / replace = "Thr"
  VARIANT (5)..(5): / replace = "Ser" / replace = "Gly"
  VARIANT (7)..(7): / replace = "Ser" / replace = "Gly"
  VARIANT (8)..(8): / replace = "Ser" / replace = "Gly"
  VARIANT (9)..(9): / replace = "Ser"
  VARIANT (10)..(10): / replace = "Phe"
  VARIANT (11)..(11): / replace = "Ala" / replace = "Leu" / replace = "Val" / replace = "Ile" / replace = "His" / replace = "Phe"
  VARIANT (12)..(12): / replace = "Val" / replace = "Ile"
  VARIANT (15)..(15): / replace = "Ala"
  VARIANT (18)..(18): / replace = "Met"
GSIGAVAAGLDLGKEGPL

SEQ ID NO: 496 - protein, 18 aa, Artificial sequence
  motif 3
  VARIANT (4)..(4): / replace = "Cys"
  VARIANT (5)..(5): / replace = "Ser"
  VARIANT (7)..(7): / replace = "Ser" / replace = "Gly"
  VARIANT (8)..(8): / replace = "Ser" / replace = "Gly"
  VARIANT (11)..(11): / replace = "Ala" / replace = "Ile"
  VARIANT (12)..(12): / replace = "Val"
GSIGAVAAGLDLGKEGPL

SEQ ID NO: 497 - protein, 17 aa, Artificial sequence
  motif 4
  VARIANT (13)..(13): / replace = "Thr"
  VARIANT (14)..(14): / replace = "Ser"
PVGGVLFALEEVATWWR

SEQ ID NO: 498 - protein, 15 aa, Artificial sequence
  motif 5
  VARIANT (2)..(2): / replace = "Arg" / replace = "Asn" / replace = "His" / replace = "Ile"
  VARIANT (5)..(5): / replace = "Met" / replace = "His"
  VARIANT (6)..(6): / replace = "Ala"
  VARIANT (8)..(8): / replace = "Lys" / replace = "Glu" / replace = "Gly"
  VARIANT (11)..(11): / replace = "Phe"
  VARIANT (13)..(13): / replace = "Leu" / replace = "Ile"
  VARIANT (14)..(14): / replace = "Tyr" / replace = "Trp"
GKCGLFGSGGLIMFD

SEQ ID NO: 499 - protein, 5 aa, Artificial sequence
  motif 6
  VARIANT (3)..(3): / replace = "Gly" / replace = "Ala"
  VARIANT (4)..(4): / replace = "Met"
  VARIANT (5)..(5): / replace = "Ala"
YNDLS

SEQ ID NO: 500 - protein, 5 aa, Artificial sequence
  motif 6
  VARIANT (5)..(5): / replace = "Ala"
YNDLS

SEQ ID NO: 501 - protein, 9 aa, Artificial sequence
  motif 7
GSMRMTVSL

SEQ ID NO: 502 - protein, 15 aa, Artificial sequence
  motif 8
  VARIANT (2)..(2): / replace = "Ile" / replace = "Leu" / replace = "Val" / replace = "Met"
  VARIANT (5)..(5): / replace = "Phe" / replace = "Val"
  VARIANT (6)..(6): / replace = "Val"
  VARIANT (7)..(7): / replace = "Ser"
  VARIANT (9)..(9): / replace = "Ala" / replace = "Ser"
  VARIANT (11)..(11): / replace = "Ala"
  VARIANT (12)..(12): / replace = "Asn"
  VARIANT (13)..(13): / replace = "Ala" / replace = "Phe" / replace = "Cys" / replace = "Gly" / replace = "Val"
MFVLLIAKTVGDSFN

SEQ ID NO: 503 - protein, 15 aa, Artificial sequence
  motif 8
  VARIANT (2)..(2): / replace = "Ile" / replace = "Leu" / replace = "Val" / replace = "Met"
  VARIANT (7)..(7): / replace = "Ser"
  VARIANT (9)..(9): / replace = "Ala" / replace = "Ser"
  VARIANT (13)..(13): / replace = "Ala" / replace = "Phe"
MFVLLIAKTVGDSFN

1-88. (canceled)

89. A method for enhancing yield-related traits in a plant relative to a control plant, comprising modulating expression in a plant of a nucleic acid selected from the group consisting of:
(a) a nucleic acid encoding a CLC-like polypeptide, wherein said CLC-like polypeptide comprises a Voltage_CLC domain (Pfam entry PF00654) and C-terminally thereof a CBS domain (Pfam entry PF00571),
(b) a nucleic acid encoding an OsBURP-like polypeptide, wherein said OsBURP-like polypeptide comprises a BURP domain,
(c) a nucleic acid encoding a AP2/ERF polypeptide, wherein said AP2/ERF polypeptide comprises an AP2/ERF domain, and
(d) a nucleic acid encoding a TPS-TPP protein fusion which is a fusion between a TPS polypeptide or an active portion thereof and a TPP polypeptide or an active portion thereof, or a first nucleic acid encoding a TPS polypeptide or an active portion thereof and a second nucleic acid encoding a TPP polypeptide or an active portion thereof, wherein the first and second nucleic acids are comprised in a single nucleic acid molecule or in multiple, at least two, nucleic acid molecules.

90. The method of claim 89, wherein
(a) the CLC-like polypeptide comprises one or more of the motifs 1 to 8 (SEQ ID NO: 83 to SEQ ID NO: 90) or one or more of the motifs as represented by SEQ ID NO: 492 to SEQ ID NO: 503,
(b) the OsBURP-like polypeptide comprises one or more of the following motifs:
(i)
Motif 9:
(SEQ ID NO: 140)
[HE][EK][HK]YCATSLESM[VI][DE][LF][SVA][TA]S[KS]LG,
(ii)
Motif 10:
(SEQ ID NO: 141)
V[VA]CH[RK][QEM][NP]Y[AP]YAVF[YG][VC]H[KGT]
[TIS][KE][AGT][AT],
(iii)
Motif 11:
(SEQ ID NO: 142)
[AP][VK][AH][EL]A[YF][QK][RV]L[KG]V[AK]PG[TKS]V
[PA]VCHFLPQD[DH][VMI][VL]W,
(c) the AP2/ERF polypeptide comprises one or more of the following motifs:
(i)
Motif 25:
(SEQ ID NO: 265)
GXRXRXWGXWVXEIRXPXXXXRXWLGSXXXXXXAAXAXDXA,
(ii)
Motif 26:
(SEQ ID NO: 266)
IXXXA,
(iii)
Motif 27:
(SEQ ID NO: 267)
DXNXXP,
(iv)
Motif 28:
(SEQ ID NO: 268)
LWXF,
wherein X indicates no conservation in the respective position,
in particular wherein said AP2/ERF polypeptide comprises Motif 25 and at least Motif 26, or wherein said AP2/ERF polypeptide comprises Motif 25, Motif 26 and Motif 27 or Motif 28, or wherein said AP2/ERF polypeptide comprises Motif 25, Motif 26 and Motif 27,
or
(d) in the TPS-TPP protein fusion,
(i) the TPS polypeptide or active portion thereof has at least 25%, 26%, 27%, 28%, 29%, 30%, 31%, 32%, 33%, 34%, 35%, 36%, 37%, 38%, 39%, 40%, 41%, 42%, 43%, 44%, 45%, 46%, 47%, 48%, 49%, 50%, 51%, 52%, 53%, 54%, 55%, 56%, 57%, 58%, 59%, 60%, 61%, 62%, 63%, 64%, 65%, 66%, 67%, 68%, 69%, 70%, 71%, 72%, 73%, 74%, 75%, 76%, 77%, 78%, 79%, 80%, 81%, 82%, 83%, 84%, 85%, 86%, 87%, 88%, 89%, 90%, 91%, 92%, 93%, 94%, 95%, 96%, 97%, 98%, 99% or 100% overall sequence identity to the amino acid sequence of any one of the polypeptides of Table A4 or an active portion thereof, the amino acid sequence of SEQ ID NO: 273 or an active portion thereof, or the amino acid sequence of SEQ ID NO: 275 or an active portion thereof,
(ii) the TPP polypeptide or an active portion thereof has at least 25%, 26%, 27%, 28%, 29%, 30%, 31%, 32%, 33%, 34%, 35%, 36%, 37%, 38%, 39%, 40%, 41%, 42%, 43%, 44%, 45%, 46%, 47%, 48%, 49%, 50%, 51%, 52%, 53%, 54%, 55%, 56%, 57%, 58%, 59%, 60%, 61%, 62%, 63%, 64%, 65%, 66%, 67%, 68%, 69%, 70%, 71%, 72%, 73%, 74%, 75%, 76%, 77%, 78%, 79%, 80%, 81%, 82%, 83%, 84%, 85%, 86%, 87%, 88%, 89%, 90%, 91%, 92%, 93%, 94%, 95%, 96%, 97%, 98%, 99% or 100% overall sequence identity to the amino acid sequence of any one of the polypeptides of Table A5 or an active portion thereof, the amino acid sequence of SEQ ID NO: 299 or an active portion thereof, or the amino acid sequence of SEQ ID NO: 301 or an active portion thereof.

91. The method of claim 89, wherein
(a) the nucleic acid encodes a CLC-like polypeptide, and wherein said modulated expression is effected by introducing and expressing in a plant said nucleic acid,
(b) the nucleic acid encodes an OsBURP-like polypeptide, and wherein said modulated expression is effected by introducing and expressing in a plant said nucleic acid, or
(c) the nucleic acid encodes an AP2/ERF-like polypeptide, and wherein said modulated expression is effected by introducing and expressing in a plant said nucleic acid,
or wherein said modulated expression is effected by introducing and expressing in a plant:
(i) a nucleic acid encoding a TPS-TPP protein fusion having at least 25%, 26%, 27%, 28%, 29%, 30%, 31%, 32%, 33%, 34%, 35%, 36%, 37%, 38%, 39%, 40%, 41%, 42%, 43%, 44%, 45%, 46%, 47%, 48%, 49%, 50%, 51%, 52%, 53%, 54%, 55%, 56%, 57%, 58%, 59%, 60%, 61%, 62%, 63%, 64%, 65%, 66%, 67%, 68%, 69%, 70%, 71%, 72%, 73%, 74%, 75%, 76%, 77%, 78%, 79%, 80%, 81%, 82%, 83%, 84%, 85%, 86%, 87%, 88%, 89%, 90%, 91%, 92%, 93%, 94%, 95%, 96%, 97%, 98%, 99% or 100% overall sequence identity to the amino acid sequence of any one of the polypeptides of Table A6 or an active portion thereof, the amino acid sequence of SEQ ID NO: 440 or an active portion thereof, the amino acid sequence of SEQ ID NO: 442 or an active portion thereof, or the amino acid sequence of SEQ ID NO: 444 or an active portion thereof; or
(ii) a first nucleic acid encoding a TPS polypeptide or an active portion thereof and a second nucleic acid encoding a TPP polypeptide or an active portion thereof, wherein the first and second nucleic acids are comprised in a single nucleic acid molecule or in multiple, at least two, nucleic acid molecules,
in particular, wherein said one or more nucleic acids as set forth in (i) and (ii) are expressed in the chloroplast of a plant cell, plant or plant part thereof and preferably comprise a sequence encoding a chloroplast targeting signal, further preferably said sequence is located at the 5′ terminus of the coding region, even more preferably encodes any one of the polypeptide chloroplast targeting signals of Table 3, most preferably encodes SEQ ID NO: 456 or a portion thereof.

92. The method of claim 89, wherein
(a) the nucleic acid encoding a CLC-like polypeptide encodes any one of the proteins listed in Table A1 or is a portion of such a nucleic acid, or a nucleic acid capable of hybridizing with such a nucleic acid,
(b) the nucleic acid encoding an OsBURP-like polypeptide encodes any one of the proteins listed in Table A2 or is a portion of such a nucleic acid, or a nucleic acid capable of hybridizing with such a nucleic acid, or
(c) the nucleic acid encoding an AP2/ERF polypeptide encodes any one of the proteins listed in Table A3 or is a portion of such a nucleic acid, or a nucleic acid capable of hybridizing with such a nucleic acid.

93. The method of claim 89, wherein the nucleic acid sequence encodes an orthologue or paralogue of any of the proteins given in Table A1, A2 or A3.

94. The method of claim 89, wherein
(a) the expression of the nucleic acid encoding a CLC-like polypeptide is modulated, and wherein said enhanced yield-related traits comprise increased yield, preferably increased biomass and/or increased seed yield, relative to a control plant,
(b) the expression of the nucleic acid encoding an OsBURP-like polypeptide is modulated, and wherein said enhanced yield-related traits comprise increased yield and/or early vigour, preferably increased biomass and/or increased seed yield, relative to a control plant,
(c) the expression of the nucleic acid encoding an AP2/ERF polypeptide is modulated, and wherein said enhanced yield-related traits comprise increased yield, preferably increased biomass and/or increased seed yield, relative to a control plant, in particular wherein said increased biomass relative to a control plant comprises early vigour, maximum height, total root biomass and harvest index, and/or wherein said increased seed yield relative to a control plant comprises total seed weight, number of filled seeds and fill rate, or
(d) the expression of the nucleic acid encoding a TPS-TPP protein fusion is modulated, or wherein the expression of a first nucleic acid encoding a TPS polypeptide or an active portion thereof, and a second nucleic acid encoding a TPP polypeptide or an active portion thereof is modulated, and wherein said enhanced yield-related traits comprise any one or more of increased size or number of floral meristems, increased number of flowers, increased number of seeds, increased yield, preferably increased biomass and/or increased seed weight, relative to a control plant.

95. The method of claim 89, wherein
(a) the expression of the nucleic acid encoding a CLC-like polypeptide is modulated, and wherein said enhanced yield-related traits are obtained under conditions of drought stress or salt stress,
(b) the expression of the nucleic acid encoding an OsBURP-like polypeptide is modulated, and wherein said enhanced yield-related traits are obtained under drought stress conditions,
(c) the expression of the nucleic acid encoding an AP2/ERF polypeptide is modulated, and wherein said enhanced yield-related traits are obtained under conditions of drought stress, salt stress or nitrogen deficiency, in particular wherein said enhanced yield-related traits are obtained under drought-stress conditions, or
(d) the expression of the nucleic acid encoding a TPS-TPP protein fusion is modulated, or wherein the expression of a first nucleic acid encoding a TPS polypeptide or an active portion thereof, and a second nucleic acid encoding a TPP polypeptide or an active portion thereof is modulated, and wherein said enhanced yield-related traits are obtained under plant cell, plant culturing conditions where nitrogen would be limiting for growth for the control plant cell, plant or a part thereof, and/or wherein said enhanced yield-related traits are obtained under non-stress conditions or under stress conditions selected from any one or more of drought, salt and cold stress.

96. The method of claim 89, wherein said nucleic acid or said one or more nucleic acids is/are operably linked to a constitutive promoter, a GOS2 promoter, or a GOS2 promoter from rice.

97. The method of claim 89, wherein
(a) the nucleic acid encoding a CLC-like polypeptide is of plant origin, from a dicotyledonous plant, from the family Poaceae, from the genus Oryza, or from Oryza sativa,
(b) the nucleic acid encoding an OsBURP-like polypeptide is of plant origin, from a monocotyledonous plant, from the family Poaceae, from the genus Oryza, or from Oryza sativa,
(c) the nucleic acid encoding an AP2/ERF polypeptide is of plant origin, from a dicotyledonous plant, from the family Fabaceae, from the genus Medicago, or from M. truncatula, or
(d) the one or more said nucleic acids encoding the TPS or TPP protein is of plant origin, from a dicotyledonous plant, from the family Brassicaceae, from the genus Arabidopsis, from Arabidopsis thaliana, of bacterial origin, from Saccharomyces, or from Saccharomyces cerevisiae.

98. A plant or part thereof, including seeds, obtained by the method of claim 89, wherein the plant or part thereof comprises:
(a) a recombinant nucleic acid encoding a CLC-like polypeptide,
(b) a recombinant nucleic acid encoding an OsBURP-like polypeptide,
(c) a recombinant nucleic acid encoding an AP2/ERF polypeptide,
(d) (i) a nucleic acid encoding a TPS-TPP protein fusion;
(ii) a first nucleic acid encoding a TPS polypeptide or an active portion thereof, and a second nucleic acid encoding a TPP polypeptide or an active portion thereof, wherein the first and second nucleic acids are comprised in a single nucleic acid molecule or in multiple, at least two, nucleic acid molecules; or
(iii) said one or more nucleic acids of (i) and (ii) further comprising a sequence encoding a chloroplast targeting signal.

99. A construct comprising:
(a) a nucleic acid encoding:
(i) the CLC-like polypeptide as defined in claim 89,
(ii) the OsBURP-like polypeptide as defined in claim 89,
(iii) the AP2/ERF polypeptide as defined in claim 89; or
(iv) a1) a nucleic acid encoding a TPS-TPP protein fusion,
b1) a first nucleic acid encoding a TPS polypeptide or an active portion thereof, and a second nucleic acid encoding a TPP polypeptide or an active portion thereof, wherein the first and second nucleic acids are comprised in a single nucleic acid molecule or in multiple, at least two, nucleic acid molecules, or
c1) said one or more nucleic acids of a1) and b1) further comprising a sequence encoding a chloroplast targeting signal,
(b) one or more control sequences capable of driving expression of the nucleic acid sequence of (a), and optionally
(c) a transcription termination sequence.

100. The construct of claim 99, wherein one of said control sequences is a constitutive promoter, a GOS2 promoter, or a GOS2 promoter from rice.

101. A method for the production of a transgenic plant, comprising transforming the construct of claim 99 into a plant, wherein
(a) the nucleic acid encodes the CLC-like polypeptide, the OsBURP-like polypeptide, or the AP2/ERF polypeptide, and wherein the transgenic plant has increased yield, particularly increased biomass and/or increased seed yield, relative to a control plant, or
(b) the nucleic acid encodes the TPS-TPP protein fusion, or wherein the first nucleic acid encodes the TPS polypeptide or an active portion thereof, and the second nucleic acid encodes the TPP polypeptide or an active portion thereof, and wherein the transgenic plant has increased size or number of floral meristems, increased number of flowers, increased number of seeds, increased yield, preferably increased biomass and/or increased seed weight, relative to a control plant.

102. A plant, plant part or plant cell transformed with the construct of claim 99.

103. A method for the production of a transgenic plant, comprising:
(a) introducing and expressing in a plant
(i) the nucleic acid encoding a CLC-like polypeptide as defined in claim 89;
(ii) the nucleic acid encoding an OsBURP-like polypeptide as defined in claim 89;
(iii) the nucleic acid encoding an AP2/ERP-like polypeptide as defined in claim 89,
(iv) a nucleic acid encoding a TPS-TPP protein fusion,
(v) a first nucleic acid encoding a TPS polypeptide or an active portion thereof, and a second nucleic acid encoding a TPP polypeptide or an active portion thereof, wherein the first and second nucleic acids are comprised in a single nucleic acid molecule or in multiple, at least two, nucleic acid molecules,
(vi) a nucleic acid encoding a TPS-TPP protein fusion further comprising a sequence encoding a chloroplast targeting signal, or
(vii) a first nucleic acid encoding a TPS polypeptide or an active portion thereof, and a second nucleic acid encoding a TPP polypeptide or an active portion thereof, wherein the first and second nucleic acids are comprised in a single nucleic acid molecule or in multiple, at least two, nucleic acid molecules, said one or more nucleic acids further comprising a sequence encoding a chloroplast targeting signal; and
(b) cultivating the plant under conditions promoting plant growth and development,
wherein the transgenic plant has increased yield, particularly increased biomass and/or increased seed yield, relative to a control plant if the nucleic acid is a nucleic acid as defined in any one of (i) to (iii), or
wherein the transgenic plant has increased size or number of floral meristems, increased number of flowers, increased number of seeds, increased yield, preferably increased biomass and/or increased seed weight, relative to a control plant, if the nucleic acid is nucleic acid as defined in any one of (iv) to (vii).

104. A transgenic plant
(a) having increased yield, particularly increased biomass and/or increased seed yield, relative to a control plant, resulting from modulated expression of the nucleic acid encoding a CLC-like, OsBURP-like or AP2/ERP polypeptide as defined in claim 89, or
(b) having increased size or number of floral meristems, increased number of flowers, increased number of seeds, increased yield, preferably increased biomass and/or increased seed weight, relative to a control plant, resulting from modulated expression of:
(i) a nucleic acid encoding a TPS-TPP protein fusion;
(ii) a first nucleic acid encoding a TPS polypeptide or an active portion thereof, and a second nucleic acid encoding a TPP polypeptide or an active portion thereof, wherein the first and second nucleic acids are comprised in a single nucleic acid molecule or in multiple, at least two, nucleic acid molecules; or
(iii) said one or more nucleic acids of (i) and (ii) further comprising a sequence encoding a chloroplast targeting signal;
or a transgenic plant cell derived from said transgenic plant.

105. The transgenic plant of claim 98, or a transgenic plant cell derived thereof, wherein said transgenic plant is a crop plant, a monocot or a cereal, such as rice, maize, wheat, barley, millet, rye, triticale, sorghum emmer, spelt, secale, einkom, teff, milo and oats.

106. Harvestable parts of the transgenic plant of claim 105, wherein said harvestable parts are preferably shoot biomass and/or seeds.

107. Products derived from the transgenic plant of claim 105 and/or from harvestable parts of said plant.
